(19) United States
(12) Patent Application Publication
(10) Pub. No.: US 2011/0027789 A1
(43) Pub. Date: Feb. 3, 2011

(54) METHODS FOR PRESERVATION OF GENOMIC DNA SEQUENCE COMPLEXITY

(75) Inventor: Joern Lewin, Berlin (DE)

Correspondence Address: Epigenomics AG, Kleine Praesidentenstr. 1, Berlin, 10178, DE

(73) Assignee: EPIGENOMICS AG, Berlin (DE)

(21) Appl. No.: 12/848,239

(22) Filed: Aug. 2, 2010

(30) Foreign Application Priority Data
Aug. 3, 2009 (DE) 09167075.2

(51) Int. Cl. C12Q 1/68; C12P 19/34; C07H 21/04; C12N 9/10

(52) U.S. Cl. 435/6; 435/91.5; 536/23.1; 435/193

(57) ABSTRACT

The present invention relates to methods and kits for preserving genomic DNA sequence complexity within chemically and/or enzymatically converted DNA by an enzyme or series of enzymes that adds a methyl group to a cytosine outside of CpG dinucleotide sequences of genomic DNA. Further, the present invention relates to methylation analysis of the genomic DNA.

### CROSS-REFERENCE TO RELATED APPLICATIONS

[0001] This application claims priority from European Provisional Patent Application Serial No. 09167075.2 filed on Aug. 3, 2009, which is incorporated herein by reference in its entirety.

### INCORPORATION-BY-REFERENCE OF INFORMATION SUBMITTED ELECTRONICALLY

[0002] The Sequence Listing comprising SEQ ID NOs: 1 to 135, which is a part of the present disclosure, includes a computer readable file “Complexity_ST25.TXT” generated by U.S. Patent & Trademark Office PatentIn version 3.5 software comprising nucleotide and/or amino acid sequences of the present invention. The subject matter of the Sequence Listing is incorporated herein by reference in its entirety.

### FIELD OF THE INVENTION

[0003] The present invention relates to novel methods and kits for preserving genomic DNA sequence complexity, and more particularly to novel methods and kits for preserving genomic DNA sequence complexity within chemically and/or enzymatically converted DNA by an enzyme or series of enzymes that adds a methyl group to a cytosine outside of CpG dinucleotide sequences of genomic DNA. Further, the present invention relates to nucleic acids of the preserved and treated genomic DNA sequence complexity. In addition, the present invention relates to use of the said methods, nucleic acids, and/or kits.

### BACKGROUND ART

[0004] It is well known in the art that DNA as well as RNA can be methylated. The base 5-methylcytosine is the most frequent covalently modified base found in the DNA of eukaryotic cells. DNA methylation plays an important biological role in, for example, regulating transcription, genomic imprinting, and tumorigenesis (for review see, e.g., Millar et al.: Five not four: History and significance of the fifth base; in The Epigenome, S. Beck and A. Olek (eds.), Wiley-VCH Publishers, Weinheim 2003, pp. 3-20). The identification of 5-methylcytosine is of particular interest in the area of cancer diagnosis. But the identification of methylation is difficult. Cytosine and 5-methylcytosine have the same base-pairing behavior, making 5-methylcytosine difficult to detect using particular standard methods. The conventional DNA analysis methods based on hybridization, for example, are not applicable. In addition, the methylation information is lost completely by the amplification by means of PCR.

[0005] Accordingly, current methods for DNA methylation analysis are based on at least two different approaches. The first approach utilizes methylation specific restriction enzymes to distinguish methylated DNA, based on methylation specific DNA cleavage. The second approach comprises selective chemical conversion (e.g., bisulfite treatment; see e.g. WO 2005/038051) of unmethylated cytosines to uracil while methylated cytosines remain unchanged. Uracil has the same base pairing behavior as thymine. It therefore forms base pairs with adenine. Instead, 5-methylcytosine hybridizes with guanine still after bisulfite treatment. It is therewith possible to differentiate between methylated and unmethylated cytosines. Alternatively, cytosine may be converted by enzymes like for example cytidine-deaminase which converts unmethylated cytosine faster as methylated cytosine. An appropriate enzyme is described by Bransteitter et al. (Bransteitter et al.: “Activation-induced cytidine deaminase deaminates deoxycytidine on single-stranded DNA but requires the action of Rnase”. PNAS 2003, 100(7): 4102-4107; WO 2005/005660).

[0006] The enzymatically or chemically pretreated DNA generated in these approaches is typically sequenced and/or pre-amplified and analyzed in different ways (see, e.g., WO 02/072880 pp. 1 ff; Fraga and Estella: DNA methylation: a profile of methods and applications; Biotechniques, 33:632, 634, 636-49, 2002). A wide range of methods exists to detect genomic DNA methylation, including approaches to detect genome-wide and gene-specific methylation levels. Some embodiments of these methods allow also a quantification of methylation i.e. the determination of the amount of DNA molecules that are methylated or unmethylated at said pre-defined CpG position within a mixture of DNA molecules.

[0007] Various methylation assay procedures are known in the art, and can be used in conjunction with the present invention. Most methods used to analyze the methylation state or level of a specific sequence are based on bisulfite modification of the DNA or other reagents with the same treatment behavior as bisulfite. Following the treatment, the methylation status can be assessed as a sequence difference for example by direct sequencing, Pyrosequencing, Next Generation Sequencing, primer extension, COBRA, MLA, MSP, MethyLight, HM, QM, and HQM.

### DISCLOSURE OF THE INVENTION

### The Problems and its Solution

[0008] At least one drawback that the above mentioned methylation methods and analysis face is that unmethylated cytosines are chemically and/or enzymatically converted to uracils which have the same base paring behavior as thymines throughout of the genomic DNA, i.e. unmethylated cytosines within the CpG dinucleotide sequences and outside of the CpG dinucleotide sequences are converted. As a result, the modified genomic DNA sequence mostly reduces to only three bases (A, T, G). This less complex DNA sequence creates problems in DNA sequencing, designing methylation assays, reference sequence mapping, and methylation analysis.

[0009] The resulted reduced DNA sequence complexity often makes the development of methylation assays difficult due to diminished flexibility in designing quality PCR assay, sequencing primers, unique probes and blockers, and due to reduced signal strength or abnormally shaped sequencing reactions, in particular on a genome wide scale.

[0010] Further, in methylation analysis methods conversion of cytosines to thymines generates poly T stretches that make the sequence signal unreadable and causes PCR dye blobs, sequence reaction to fail, sequence signal to drop suddenly, and overestimation of cytosine signal background. For example, Pyrosequencing can be inaccurate when multiple identical nucleotides, in particular T signals, are sequentially repeated in a DNA strand.

[0011] In addition, searching for a chemically and/or enzymatically treated, in particular bisulfite read, is significantly increased relative to the original reference sequence. Unlike normal sequencing, the sense and anti-sense strands of the treated sequences are not complementary to each other because the conversion only occurs on cytosines. As a result, there will be four distinct strands after PCR amplification. During sequencing and in particular shotgun sequencing methods, a bisulfite read is almost equally likely to be derived from any of the four strands. Also, after chemically treated or in particular bisulfite treatment of genomic DNA, the Ts in the bisulfite reads could be mapped to either Cs or Ts in the reference but not vice versa. Furthermore, in the mammalian genome, the frequency of CpG dinucleotides in human genomes is only 1% (Scarano E, Iaccarino M, Grippo P, Parisi E (1967). “The heterogeneity of thymine methyl group origin in DNA pyrimidine isostichs of developing sea urchin embryos”. Proc. Natl. Acad. Sci. USA 57 (5): 1394-400). Because cytosine methylation occurs almost exclusively at CpG dinucleotides, the majority of Cs in the sense and anti-sense strands will be converted to Ts. Therefore, most chemically and/or enzymatically treated, in particular bisulfite reads from the above two strands will be C-poor. Drastic reduction in overall C content of chemically treated, in particular, bisulfite reads and ultimately C signals causes problems in quantitative assessment of DNA genome and in particular on a genome-wide scale.

[0012] It would be desirable to create methods to preserve the complexity of genomic DNA, in particular on genome-wide scale, to reduce poly T signals in methylation analysis of genomic DNA, to avoid reduction in overall C content of bisulfite reads and ultimately C signals in order to have a sensitive and an accurate quantitative assessment of genomic DNA methylation, to reduce the difficulties associated with searching chemically treated, in particular, bisulfite reads and with reference sequence mapping. Ultimately, it is desirable to improve diagnosis, prognosis, and monitoring of cancer or other diseases associated with an alteration of the methylation status and to improve prognosis of unwanted drug side effects, for differentiating of cell types, tissue, or for examination of cell differentiation.

[0013] To solve the problems mentioned above, the present invention provides such methods to preserve the complexity of genomic DNA, in particular on genome-wide scale.

### SUMMARY OF THE INVENTION

[0014] The present invention provides a method for preserving DNA complexity comprising treating a genomic DNA, or a fragment thereof, with an enzyme or series of enzymes that adds a methyl group to a cytosine outside of CpG dinucleotide sequences of the said genomic DNA, or a fragment thereof In further embodiment, the present invention provides a method for methylation analysis of the genomic DNA.

[0015] In another embodiment, the present invention provides a method for obtaining methylation analysis of the a genomic DNA, comprising treating a genomic DNA, or a fragment thereof with an enzyme or series of enzymes that adds a methyl group to a cytosine outside of the CpG dinucleotide sequences of the said genomic DNA, or a fragment thereof; treating the said preserved genomic DNA, or a fragment thereof, with one or more reagents to convert unmethylated cytosine bases to uracil or to another base that is detectably dissimilar to cytosine in terms of hybridization properties; amplifying the preserved and treated genomic DNA by means of an amplification enzyme and at least one oligonucleotide which is identical, is complementary, or hybridizes under stringent or highly stringent conditions to at least 9 base long segment of the treated and preserved genomic DNA, and detecting the methylation state or level of at least one CpG dinucleotide of the genomic DNA, or an average, or a value reflecting an average methylation state or level of a plurality of CpG dinucleotides of the genomic DNA based on a presence, absence or amount of, or on a property of said amplificate.

[0016] In another embodiment, the present invention provides a method for obtaining methylation analysis of the a genomic DNA sequence, wherein the said genomic DNA comprising at least one target region, said target region comprises of at least 16 contiguous nucleotides selected from a group consist of SEQ ID Nos.: 1 to 7, wherein said contiguous nucleotides comprise at least one CpG dinucleotide sequence. In further embodiment, the target region is consist of at least one gene, its promoter, regulatory elements, or all transcripts variants thereof selected from the group consisting of Septin9, Q9HC74, GSTPi, PITX2, RASSF2A, and SHOX2.

[0017] In an embodiment, the present invention provides a method for methylation analysis of the genomic DNA comprising: contacting the preserved and treated said genomic DNA, or the treated fragment thereof, with an amplification enzyme and at least one oligonucleotide, which is identical, is complementary, or hybridizes under stringent or highly stringent conditions to at least 9 base long segment of a sequence selected from SEQ ID NOs: 36 to 63 and SEQ ID NOs: 92 to 119, wherein the preserved and treated genomic DNA or the fragment thereof is either amplified to produce at least one amplificate, or is not amplified; and determining, based on a presence, absence or amount of, or on a property of said amplificate, the methylation state or level of at least one CpG dinucleotide of SEQ ID Nos: 1 to 7, or an average, or a value reflecting an average methylation state or level of a plurality of CpG dinucleotides of SEQ ID Nos.: 1 to 7.

[0018] In another embodiment, the present invention provides a method for methylation analysis of the genomic DNA further comprising use of at least one nucleic acid molecule or peptide nucleic acid molecule comprising in each case a contiguous sequence at least 9 nucleotides in length that is complementary to a sequence selected from the group consisting of SEQ ID NO: 36 to 63 and SEQ ID NO: 92 to 119, and complements thereof, wherein said nucleic acid molecule or peptide nucleic acid molecule suppresses amplification of the nucleic acid to which it is hybridized.

[0019] In an another embodiment, the present invention provides a method for methylation analysis of the genomic DNA further comprising at least one such hybridized nucleic acid molecule or peptide nucleic acid molecule is bound to a solid phase. In an another embodiment, the present invention provides a method for methylation analysis of the genomic DNA further comprising extending at least one such hybridized nucleic acid by at least one nucleotide base.

[0020] In another embodiment, the present invention provides a method for methylation analysis of the genomic DNA wherein the said above amplification comprises use of at least one method selected from the group comprising: use of a heat-resistant DNA polymerase as the amplification enzyme; use of polymerase lacking 5′-3′ exonuclease activity; use of a polymerase chain reaction (PCR); generation of an amplificate nucleic acid molecule carrying a detectable label.

[0021] In another embodiment the said amplification comprises use of methylation-specific primers. In another embodiment the said detection comprises sequencing of amplificate.

[0022] In another embodiment, further detecting, monitoring, prognosis and/or classifying cell proliferative disorders is, at least in part, afforded. In further embodiment, the said cell proliferative disorder is hepatocellular, colorectal, lung, breast, or prostate cell proliferative disorders.

[0023] In further embodiment, the said genomic DNA is isolated from a group comprising cell lines, histological slides, biopsies, paraffin-embedded tissue, body fluids, stool, colonic effluent, urine, blood plasma, blood serum, whole blood, isolated blood cells, cells isolated from the blood and combinations thereof.

[0024] In further embodiment of the present invention, the reagent is a solution of a bisulfite, hydrogen sulfite or disulfite.

[0025] In further embodiment, the present invention discloses a nucleic acid comprising at least 16 contiguous nucleotides of a DNA sequence selected from the group consisting of SEQ ID Nos.: 8 to 119, and sequences complementary thereto. In further embodiment of the present invention the said nucleic acid contiguous base sequence comprises at least one CpG, TpG or CpA dinucleotide sequence.

[0026] In further embodiment, the present invention discloses a kit suitable for performing the methods according to the invention comprising (a) an enzyme or series of enzymes that adds a methyl group to a cytosine outside of the CpG dinucleotide sequences of the said genomic DNA, or a fragment thereof; (b) containers suitable for containing the said enzyme and the biological sample of the patient; and optionally (c) instructions for use and interpretation of the kit results.

[0027] In further embodiment of the present invention the said kit further comprising one or more reagents to convert unmethylated cytosine bases to uracil or to anther base that is detectably dissimilar to cytosine in terms of hybridization properties.

[0028] In a further embodiment of the present invention the said kit further comprising at least one oligonucleotide which is identical, is complementary, or hybridizes under stringent or highly stringent conditions to at least 9 base long segment of a sequence selected from SEQ ID NOs.: 36-63 and SEQ ID NOs: 92 to 119.

[0029] In further embodiment, the present invention discloses use of the methods, nucleic acids and kits according to the present invention in the diagnosis, prognosis, monitoring and/or classification of cellular proliferative disorders. In a further embodiment, the said cellular proliferative disorder is hepatocellular, colorectal, breast, lung, or prostate proliferative disorder.

[0030] Additional embodiments provide use of the methods, nucleic acids, and/or kits for methylation analysis of the genomic DNA, for diagnosis of cancer or other diseases associated with an alteration of the methylation status, and for prognosis of unwanted drug side effects, for differentiating of cell types, tissue, or for examination of cell differentiation, in particular hepatocellular, colorectal, breast, lung, or prostate proliferative disorder.

### DRAWINGS

[0031] Those of skill in the art will understand that the drawings, described below, are for illustrative purposes only. The drawings are not intended to limit the scope of the present teachings in any way.

[0032] FIG. 1A. Illustrates a conventional Heavymethyl assay for a segment of Sepin9 region which its complexity is not preserved according to the present invention. “P” stands for primer, “BL” stands for Blocker, “PR” stands for probe, and “re” stands for reverse complement.

[0033] FIG. 1B. Illustrates a Heavymethyl assay designed for methylation analysis according to the present invention. The analyzed segment of Septin9 region is both preserved and bisulfite treated. Further, FIG. 1B shows that nine cytosines within the segment of Septin9 region of SEQ ID NO.: 1 have been preserved or conserved according to the method of invention to achieve the above said advantages.

[0034] FIG. 2. Illustrates treatment of Septin9 region—forward strand—after Cp[AT] methylation. Artificially methylated cytosines are portrayed as “C” in capital letter.

### DETAILED DESCRIPTION OF THE INVENTION

[0035] Definitions:

[0036] “Complexity” in the dinucleotide sequences of present invention is meant to be a measure for the similarity of a given sequence to a random or stochastic sequence; the more complex a sequence is the more it is similar to a random sequence. A reduced complexity of the genomic DNA means there are less degrees of variation, e.g most of the bases reduce to A, T, G. Where there are essentially only three different nucleotides rather than four, the probability of a sequence to occur twice in a given length of sequence is much higher.

[0037] “Preserving genomic DNA complexity” refers to avoiding or reducing complexity reduction of the genomic DNA. “Preserved genomic DNA” or “preserved DNA” in the context of the current application refers to preserved genomic DNA sequence complexity according to the method of the present invention.

[0038] Capital letter “C” in the context of DNA sequences refers to methylated cytosine residue or is a target for methylation via an enzyme or enzymes that adds a methyl group to a cytosine outside of CpG dinucleotide sequence of a genomic DNA.

[0039] “Alu Methyltransferase” is a known enzyme from E. coli strain that carries the cloned AluI modification gene from Arthrobacter luteus. Alu Methyltransferase modifies the cytosine residue (C⁵) in the sequence below (agCt and tCga):

[chemical structure]

[0040] “HaeIII Methyltransferase” is a known enzyme from E. coli strain that carries the cloned HaeIII modification gene from Haemophilus aegyptius. HaeIII Methyltransferase modifies the internal cytosine residue (C⁵) in the sequence below (ggCc and cCgg):

[chemical structure]

[0041] “MspI Methyltransferase” is a known enzyme from an E. coli strain that carries the cloned MspI modification gene from Moraxella species. MspI Methyltransferase modifies the external cytosine residue (C⁵) in the sequence below (Ccgg and ggcC):

[chemical structure]

[0042] “Dnmt2” belongs to a widely conserved family of putative DNA methyltransferases derived from the Drosophila genome. Dnmt2 methylates the cytosine residue at CpT and CpA dinucleotides “Cp[AT]”.

[0043] The term “Observed/Expected Ratio” (“O/E Ratio”) refers to the frequency of CpG dinucleotides within a particular DNA sequence, and corresponds to the [number of CpG sites/(number of C bases×number of G bases)]/band length for each fragment.

[0044] The term “CpG island” refers to a contiguous region of genomic DNA that satisfies the criteria of (1) having a frequency of CpG dinucleotides corresponding to an “Observed/Expected Ratio” >0.6, and (2) having a “GC Content” >0.5. CpG islands are typically, but not always, between about 0.2 to about 1 KB, or to about 2 kb in length.

[0045] The term “methylation state” or “methylation status” refers to the presence or absence of 5-methylcytosine (“5-mCyt”) at one or a plurality of CpG dinucleotides within a DNA sequence. Methylation states at one or more particular CpG methylation sites (each having two CpG dinucleotide sequences) within a DNA sequence include “unmethylated,” “fully-methylated” and “hemi-methylated.”

[0046] The term “methylation level” or “level of methylation” refers to the degree of 5 methylcytosine (“5-mCyt”) at one or a plurality of CpG dinucleotides within a DNA sequence wherein one or more DNA molecules are considered.

[0047] The term “hemi-methylation” or “hemimethylation” refers to the methylation state of a double stranded DNA wherein only one strand thereof is methylated.

[0048] The term “microarray” refers broadly to both “DNA microarrays,” and ‘DNA chip(s),’ as recognized in the art, encompasses all art-recognized solid supports, and encompasses all methods for affixing nucleic acid molecules thereto or synthesis of nucleic acids thereon.

[0049] “Genetic parameters” are mutations and polymorphisms of genes and sequences further required for their regulation. To be designated as mutations are, in particular, insertions, deletions, point mutations, inversions and polymorphisms and, particularly preferred, SNPs (single nucleotide polymorphisms).

[0050] “Epigenetic parameters” are, in particular, cytosine methylation. Further epigenetic parameters include, for example, the acetylation of histones which, however, cannot be directly analyzed using the described method but which, in turn, correlate with the DNA methylation.

[0051] The term “bisulfite reagent” refers to a reagent comprising bisulfite, disulfite, hydrogen sulfite or combinations thereof, useful as disclosed herein to distinguish between methylated and unmethylated CpG dinucleotide sequences.

[0052] The term “Methylation assay” refers to any assay for determining the methylation state of one or more CpG dinucleotide sequences within a sequence of DNA.

[0053] The term “hybridisation” is to be understood as a bond of an oligonucleotide to a complementary sequence along the lines of the Watson-Crick base pairings in the sample DNA, forming a duplex structure.

[0054] The term “hypermethylation” refers to the average methylation state corresponding to an increased presence of 5-mCyt at one or a plurality of CpG dinucleotides within a DNA sequence of a test DNA sample, relative to the amount of 5-mCyt found at corresponding CpG dinucleotides within a normal control DNA sample.

[0055] The term “hypomethylation” refers to the average methylation state corresponding to a decreased presence of 5-mCyt at one or a plurality of CpG dinucleotides within a DNA sequence of a test DNA sample, relative to the amount of 5-mCyt found at corresponding CpG dinucleotides within a normal control DNA sample.

[0056] Primer extension: Several embodiments of the primer extension method exist. These methods are based on the conversion of unmethylated cytosines to uracil while methylated cytosines remain unchanged by means of bisulfite. The resulting converted DNA is then subjected to pre-amplification, in particular PCR. Thereafter a methylation specific elongation of a primer is carried out. The binding site of said primer is located up to 10 bases before the cytosine position to be analyzed, is adjacent to it, or encompasses it. After hybridization the primer is elongated by one up to 10 nucleotides. The said methods are for example described in U.S. Pat. No. 6,251,594, WO 01/62961, WO 01/062960, and WO 01/062064.

[0057] QM (Quantitative Methylation) method: According to this method, DNA is subjected to treatment, wherein methylated cytosine remains unchanged and unmethylated cytosine is converted to uracil or another base having different base pairing behaviour than cytosine. The converted DNA is then subjected to a real time PCR amplification in the presence of two probe systems. One probe system is specific for the case of methylation of the CpG positions of interest. The other probe system is specific for the case the CpG positions of interest are not methylated. Suitable probe systems are for example Taqman probes or LightCycler probes. In case of Taqman probes, each probes system consist of one probe. In case in of Lightcycler probes, each probe system consists of two probes acting cooperatively. By means of the said probe systems, the amplification products derived from correspondent converted methylated or unmethylated DNA are detected during amplification. From this, the amount of orignal DNA being methylated or being unmethylated is deduced. The QM method is for example described in WO 2005/098035.

[0058] HQM (Heavy Quantitative Methylation) method: According to this method, unmethylated cytosines of a double stranded DNA are converted to uracil or a base having a different base pairing behaviour than cytosine while methylated cytosine remains unchanged. In preferred embodiments of the HQM method both converted strands are subjected to methylation analysis, in particular wherein orginally reverse complementary regions are analysed in the subjected DNA. In particular preferred is the analysis of both converted DNA strands in methylation specific reactions. Such reactions may be: PCR, isothermal amplification, LCR, MSP, HeavyMethyl, bisulfite sequencing, microarrays, methylation specific restriction enzymes, real-time PCR, HeavyMethyl, MethyLight, QM, methylation sensitive primer extension. The HQM method is described in detail in WO 2008/017411

[0059] The term “MethyLight™ ” refers to the art-recognized fluorescence-based real-time PCR technique described by Eads et al., Cancer Res. 59:2302-2306, 1999. According to this method, DNA is treated with a modifying agent wherein unmethylated cytosines become modified. Thereafter the treated DNA is analyzed by real-time PCR with one or more probe. The binding site of said probe or probes comprises one or more CpG positions. Thus, the amount of amplification product derived either from DNA with methylated CpG positions or from DNA with unmethylated CpG positions is detected during amplification. From this, the amount of orginal DNA being methylated or unmethylated at the analysed CpG positions is deduced. Suitable probe systems for analysis are Taqman probe, LightCycler probes or Scorpion primers. The MethyLight method is for example described in WO 00/70090; U.S. Pat. No. 6,331,393; or Trinh et al.: DNA methylation analysis by MethyLight technology. Methods, 25:456-62, 2001).

[0060] The term “HeavyMethyl™” assay or “HM”, in the embodiment thereof implemented herein, refers to an assay, wherein methylation specific blocking probes (also referred to herein as blockers) covering CpG positions between, or covered by the amplification primers enable methylation-specific selective amplification of a nucleic acid sample. According to this method, in a first step, unmethylated cytosines of a DNA are converted to uracil while methylated cytosines remain unchanged. The converted DNA is then subjected to an amplification reaction. The amplification of the converted methylated or unmethylated DNA of interest is detected during the amplification while undesired background DNA is simultaneously suppressed by means of a blocker. Said blocker is either specific for background converted methylated DNA or background converted unmethylated DNA. Preferably, the HM method is carried out as a real time variant. The HM method is described for example in WO 02/072880.

[0061] The term “HeavyMethyl™ MethyLight™” assay, in the embodiment thereof implemented herein, refers to a HeavyMethyl™ MethyLight™ assay, which is a variation of the MethyLight™ assay, wherein the MethyLight™ assay is combined with methylation specific blocking probes covering CpG positions between the amplification primers.

[0062] The term “Ms-SNuPE” (Methylation-sensitive Single Nucleotide Primer Extension) refers to the art-recognized assay described by Gonzalgo & Jones, Nucleic Acids Res. 25:2529-2531, 1997.

[0063] The term “MSP” (Methylation-specific PCR) refers to the art-recognized methylation assay described by Herman et al. Proc. Natl. Acad. Sci. USA 93:9821-9826, 1996, and by U.S. Pat. No. 5,786,146. According to this method, DNA is treated with bisulfite resulting in a conversion of unmethylated cytosines to uracil while methylated cytosines remain unaltered. After said conversion, the DNA is subjected to PCR amplification by means of methylation-specific primers. The MSP method is for example described in Herman et al.: Methylation specific PCR: a novel PCR assay for methylation status of CpG islands. Proc Natl Acad Sci USA. 93:9821-6, 1996. When carried out as a real-time variant, the MSP allows a quantification of amplified products. Thus, it is possible to deduce the amount of subjected DNA being methylated or unmethylated at the cytosine positions of interest.

[0064] The term “COBRA” (Combined Bisulfite Restriction Analysis) refers to the art-recognized methylation assay described by Xiong & Laird, Nucleic Acids Res. 25:2532-2534, 1997. According to this method, DNA is treated with bisulfite. After the treatment, the DNA is amplified by means of PCR. Thereafter, the amplified DNA is digested by means of restriction enzymes. Said enzymes are specific for bisulfite treated unmethylated sites. Digested or undigested fragments are finally detected for example by gel electrophoresis and in if the case may be hybridization of a specific labeled probe. Methylation levels in the original DNA sample are represented by the relative amounts of digested and undigested PCR product. The COBRA method is for example described in Xiong & Laird, Nucleic Acids Res. 25:2532-2534, 1997.

[0065] MLA (Methylation Sensitive Ligation and Amplification): According to this method, DNA is subjected to a treatment wherein unmethylated cytosine is converted to uracil, while methylated cytosine remains unchanged. Preferably, said treatment is a treatment with bisulfite. Subsequently, the treated DNA is amplified by means of at least two pairs of essentially complementary probe oligonucleotides. The methylation status of the cytosine of interest in the orignal DNA is deduced from the presence or absence of amplificates. The MLA method is for example described in WO 03/057909.

[0066] The term “MCA” (Methylated CpG Island Amplification) refers to the methylation assay described by Toyota et al., Cancer Res. 59:2307-12, 1999, and in WO 00/26401A1.

[0067] The term “hybridization” is to be understood as a bond of an oligonucleotide to a complementary sequence along the lines of the Watson-Crick base pairings in the sample DNA, forming a duplex structure.

[0068] Direct sequencing: This sequencing method uses bisulfite-treated DNA utilized with PCR and standard dideoxynucleotide DNA sequencing directly determine the nucleotides resistant to bisulfite conversion. Primers are designed to be strand-specific as well as bisulfite-specific. Both methylated and unmethylated sequences are amplified. All sites of unmethylated cytosines are portrayed as thymines in the resulting amplified sequence of the sense strand, and as adenines in the amplified antisense strand.

[0069] Pyrosequencing: Pyrosequencing is a real-time sequencing technology based on luminometric detection of pyrophosphate release upon nucleotide incorporation which is suited for simultaneous analysis and quantification of the methylation degree of several CpG positions. After bisulfite modification of genomic DNA, a region of interest is amplified by polymerase chain reaction (PCR) with one of the two primers being biotinylated. The PCR-generated template is rendered single stranded and a Pyrosequencing primer is annealed to analyze quantitatively CpG positions. After bisulfite treatment and PCR, the degree of each methylation at each CpG position in a sequence is determined from the ratio of T and C signals reflecting the proportion of unmethylated and methylated cytosines at each CpG site in the original sequence.

[0070] The terms “Methylation-specific restriction enzymes” or “methylation-sensitive restriction enzymes” shall be taken to mean an enzyme that selectively digests a nucleic acid dependant on the methylation state of its recognition site. In the case of such restriction enzymes which specifically cut if the recognition site is not methylated or hemimethylated, the cut will not take place, or with a significantly reduced efficiency, if the recognition site is methylated. In the case of such restriction enzymes which specifically cut if the recognition site is methylated, the cut will not take place, or with a significantly reduced efficiency if the recognition site is not methylated. Preferred are methylation-specific restriction enzymes, the recognition sequence of which contains a CG dinucleotide (for instance cgcg or cccggg). Further preferred for some embodiments are restriction enzymes that do not cut if the cytosine in this dinucleotide is methylated at the carbon atom C5. “Non-methylation-specific restriction enzymes” or “non-methylation-sensitive restriction enzymes” are restriction enzymes that cut a nucleic acid sequence irrespective of the methylation state with nearly identical efficiency. They are also called “methylation-unspecific restriction enzymes.”

[0071] “Stringent hybridization conditions,” as defined herein, involve hybridizing at 68° C. in 5×SSC/5× Denhardt's solution/1.0% SDS, and washing in 0.2×SSC/0.1% SDS at room temperature, or involve the art-recognized equivalent thereof (e.g., conditions in which a hybridization is carried out at 60° C. in 2.5×SSC buffer, followed by several washing steps at 37° C. in a low buffer concentration, and remains stable). Moderately stringent conditions, as defined herein, involve including washing in 3×SSC at 42° C., or the art-recognized equivalent thereof. The parameters of salt concentration and temperature can be varied to achieve the optimal level of identity between the probe and the target nucleic acid. Guidance regarding such conditions is available in the art, for example, by Sambrook et al., 1989, Molecular Cloning, A Laboratory Manual, Cold Spring Harbor Press, N.Y.; and Ausubel et al. (eds.), 1995, Current Protocols in Molecular Biology, (John Wiley & Sons, N.Y.) at Unit 2.10.

[0072] In reference to composite array sequences, the phrase “contiguous nucleotides” refers to a contiguous sequence region of any individual contiguous sequence of the composite array, but does not include a region of the composite array sequence that includes a “node,” as defined herein above.

[0073] The term “pre-cancerous” or “pre-neoplastic” and equivalents thereof shall be taken to mean any cellular proliferative disorder which is undergoing malignant transformation. Examples of such conditions include, in the context of colorectal cellular proliferative disorders, cellular proliferative disorders with a high degree of dysplasia and the following classes of adenomas:

[0074] Level 1: penetration of malignant glands through the muscularis mucosa into the submucosa, within the polyp head

[0075] Level 2: the same submucosal invasion, but present at the junction of the head to the stalk

[0076] Level 3: invasion of the stalk

[0077] Level 4: invasion of the stalk's base at the connection to the colonic wall (this level corresponds to stage Dukes A)

[0078] The term at least one gene or genomic sequence selected from the group consisting of Septin9, Q9HC74, GSTPi, PITX2, RASSF2A, SHOX2 shall be taken to include all transcript variants thereof and all promoter and regulatory elements thereof. Furthermore as a plurality of SNPs are known within said gene the term shall be taken to include all sequence variants.

[0079] Methods of the Present Invention

[0080] In one preferred aspect of the invention, a method for preserving genomic DNA complexity is provided. This method comprises contacting genomic DNA, or a fragment thereof obtained from a subject with an enzyme or series of enzymes that adds a methyl group to a cytosine outside of CpG dinucleotide sequences of the said genomic DNA, or a fragment thereof.

[0081] Genomic DNA of the present invention may be isolated by any means standard in the art, including the use of commercially available kits. Briefly, wherein the DNA of interest is encapsulated in by a cellular membrane the biological sample can be disrupted and lysed by enzymatic, chemical or mechanical means. The DNA solution may then be cleared of proteins and other contaminants, e.g., by digestion with proteinase K. The genomic DNA is then recovered from the solution. This may be carried out by means of a variety of methods including salting out, organic extraction or binding of the DNA to a solid phase support. The choice of method will be affected by several factors including time, expense and required quantity of DNA. All clinical sample types comprising neoplastic matter or pre-neoplastic matter are suitable for use in the present method, preferred are cell lines, histological slides, biopsies, paraffin-embedded tissue, body fluids, stool, colonic effluent, urine, blood plasma, blood serum, whole blood, isolated blood cells, cells isolated from the blood and combinations thereof. Body fluids are the preferred source of the DNA; particularly preferred are blood plasma, blood serum, whole blood, isolated blood cells and cells isolated from the blood.

[0082] The said genomic DNA of invention is then treated with an enzyme or series of enzymes that adds a methyl group to a cytosine outside of CpG dinucleotide sequences of the said genomic DNA, or a fragment thereof The enzymes of the invention are selected so that they do not add a methyl group to a cytosine within the CpG dinucleotide sequences of the genomic DNA. In a preferred embodiment these enzymes are selected from a group comprising AluI Methyltransferase, HaeIII Methyltransferase, MspI Methyltransferase, and DNMT2. The genomic DNA of the invention can be treated with any enzyme with the above said characteristics and by any means standard in the art from natural origin or isolated. It is preferred that the said enzymes are isolated and purified. Isolation and purification from certain bacteria or viruses can be performed by any means standard in the art. Further, it is preferred that the said enzymes are purchased from a provider. However, enzymes with said characteristics can also specifically be designed. At least one advantage of using these enzymes is addition of a methyl group at a precise location. AluI Methyltransferase adds a methyl group to a cytosine in the 5′ . . . agCt . . . 3′ and to its reverse complement 3′ . . . tCga . . . 5′. HaeIII Methyltransferase adds a methyl group to the middle cytosine in the 5′ . . . ggCc . . . 3′ and to its reverse complement 3′ . . . cCgg . . . 5′. MspI Methyltransferase recognizes 5′. . . Ccgg . . . 3′ and its reverse complement 3′ . . . ggcC . . . 5′ sequence and adds a methyl group to a cytosine as shown in capital letter. Finally DNMT2 enzyme recognizes CpA and CpT dinucleotide sequences and methylates the cytosines in these sequences. For example, as shown in FIG. 2 for clarity purposes, treating Sepin9 gene sequence SEQ ID NO.: 1 with DNMT2 enzyme methylates cytosines in the Cp[AT] sequences. Capital “C” is indicative of the cytosines that have been methylated and preserved to achieve the above said advantages. Further, Table 2 illustrates another advantage of preserving DNA sequence complexity and in particular, preservation of cytosines within the genomic DNA sequence. Table 2 shows the number of conserved or preserved cytosines according to the method of the present invention within Septin9, Q9HC74, GSTPi, PITX2, RASSF2A, and SHOX2. For instances, there are 1229 cytosines within the Septin9 gene-sense strand-region and methylation of cytosines in the Cp[AT] sequences within the said region, conserves or preserves 614 cytosines after the bisulfite treatment, i.e. 614 cytosines are not converted to thymines

[0083] In another preferred method of the invention, the preservation of genomic DNA sequence complexity is achieved by contacting the genomic DNA isolated from a biological sample with an enzyme, or series of enzymes that adds a methyl group to a cytosine outside of the CpG dinucleotide sequences of the said genomic DNA, or a fragment thereof within at least one target region of the genomic DNA. Preferably the target region comprises, or hybridizes under stringent conditions to a sequence of at least 16 contiguous nucleotides of SEQ ID NO. 1 to 7, wherein said contiguous nucleotides comprise at least one CpG dinucleotide sequence.

[0084] In another embodiment of the invention, the genomic DNA is treated with an enzyme that methylates the cytosines in the Cp[AT] sequences. The preferred such enzyme is DNMT2. Such treatment converts the SEQ ID NO. 1 to 7 to SEQ ID NOs.: 8 to 14, to SEQ ID NO. 22 to 28, to SEQ ID NOs: 64 to 70, and to SEQ ID NOs: 78 to 84 respectively as described in Table 1.

[0085] In further embodiment of the invention, the genomic DNA is treated with an enzyme or series of enzymes that add a methyl group to a cytosine in the AGCT, GGCC, and CCGG. The preferred enzymes are AluI Methyltransferase, HaeIII Methyltransferase, and MspI Methyltransferase. The said treatment converts the SEQ ID NO. 1 to 7 to SEQ ID NOs.: 15 to 21, to SEQ ID NO. 29 to 35, to SEQ ID NOs: 71 to 77, and to SEQ ID NOs: 85 to 91 respectively as described in Table 1.

[0086] The above said enzymes according to the method of the present invention can be added alone or in any combination with other enzyme(s) that add methyl groups to the cytosine residue outside of CpG dinucleotide sequence. In another preferred embodiment of the invention, the genomic DNA sequence complexity is substantially or partially preserved. Partial preservation means that not all of the cytosines outside of the CpG dinucleotide sequences are methylated. Substantially preserved means that not all of the cytosines outside of the CpG dinucleotide sequences are methylated due to experimental error, change in reaction conditions, or any other inaccuracies or errors that a person skilled in the art face when performing an experiment.

[0087] In another embodiment of the invention, methylation analysis of the genomic DNA is analyzed. It is preferred that the method according to the invention is used for methylation analysis of vertebrates and/or mammalians.

[0088] This step of the invention is preferably achieved by means of treatment of the preserved genomic DNA as explained above with one or more reagents to convert cytosine bases that are unmethylated in the 5-position thereof to uracil or to another base that is detectably dissimilar to cytosine in terms of hybridization properties. The preferred reagent is a bisulfite reagent. The term “bisulfite reagent” refers to a reagent comprising bisulfite, disulfite, hydrogen sulfite or combinations thereof, useful as disclosed herein to distinguish between methylated and unmethylated CpG dinucleotide sequences. It is preferred that the bisulfite treatment is conducted in the presence of denaturing solvents such as but not limited to n-alkylenglycol, particularly diethylene glycol dimethyl ether (DME), or in the presence of dioxane or dioxane derivatives. In a preferred embodiment the denaturing solvents are used in concentrations between 1% and 35% (v/v). It is also preferred that the bisulfite reaction is carried out in the presence of scavengers such as but not limited to chromane derivatives, e.g., 6-hydroxy-2,5,7,8,-tetramethylchromane 2-carboxylic acid or trihydroxybenzoe acid and derivates thereof, e.g. Gallic acid. The bisulfite conversion is preferably carried out at a reaction temperature between 30° C. and 70° C., whereby the temperature is increased to over 85° C. for short periods of times during the reaction. It is also possible to conduct the conversion enzymatically, e.g. by use of methylation specific cytidine deaminases (German patent application 103 31 107.6, filing date Jul. 4, 2003, applicant: Epigenomics AG).

[0089] In another preferred method of the present invention, the methylation analysis of the said genomic DNA is analyzed comprising treating the said preserved genomic DNA, or a fragment thereof, with one or more reagents to convert unmethylated cytosine bases to uracil or to another base that is detectably dissimilar to cytosine in terms of hybridization properties, amplifying the treated genomic DNA by means of an amplification enzyme and at least one oligonucleotide which is identical, is complementary, or hybridizes under stringent or highly stringent conditions to at least 9 base long segment of treated and preserved genomic DNA, and detecting the methylation state or level of at least one CpG dinucleotide of the genomic DNA, or an average, or a value reflecting an average methylation state or level of a plurality of CpG dinucleotides of the genomic DNA based on a presence, absence or amount of, or on a property of said amplificate.

[0090] In another preferred method of the invention, the methylation analysis of the genomic DNA is achieved by contacting the isolated genomic DNA with an enzyme, or series of enzymes that adds a methyl group to a cytosine outside of the CpG dinucleotide sequences of the said genomic DNA within at least one target region of the genomic DNA, wherein the target region comprises, or hybridizes under stringent conditions to a sequence of at least 16 contiguous nucleotides of SEQ ID NO: 1 to 7, wherein said contiguous nucleotides comprise at least one CpG dinucleotide sequence. Then, treating the said preserved genomic DNA with one or more reagents, preferably bisulfite reagents, to convert unmethylated cytosine bases to uracil or to anther base that is detectably dissimilar to cytosine in terms of hybridization properties. Table 2 of the present invention shows number of cytosines conserved in each bisulfite treated strand after cytosine methylation in the Cp[AT] sequences and GGCC, AGCT, and CCGG sequences and in combination with each other. These template strands with conserved cytosines provide desirable templates for further methylation analysis with the above said advantages.

[0091] The disclosed invention further discloses a method for methylation analysis of genomic DNA, preferably, the analysis is based on a presence, absence or amount of, or on a property of amplificates, the methylation state or level of at least one CpG dinucleotide of the genomic DNA or an average, or a value reflecting an average methylation state or level of a plurality of CpG dinucleotides of the genomic DNA. In particular a method for methylation analysis of Septin 9, Q9HC74, GSTPi, PITX2, RASSF2A, SHOX2 and more in particular SEQ ID NO. 1 to 7, or an average, or a value reflecting an average methylation state or level of a plurality of CpG dinucleotides of SEQ ID NO. 1 to 7.

[0092] The present invention provides for the use of the bisulfite technique, in combination with one or more methylation assays, for determination of the methylation status of CpG dinucleotide sequences within SEQ ID NO: 1 to 7. Genomic CpG dinucleotides can be methylated or unmethylated (alternatively known as up- and down-methylated respectively). However the methods of the present invention are suitable for the analysis of biological samples of a heterogeneous nature e.g. a low concentration of tumor cells within a background of blood or stool. Accordingly, when analyzing the methylation status of a CpG position within such a sample the person skilled in the art may use a quantitative assay for determining the level (e.g. percent, fraction, ratio, proportion or degree) of methylation at a particular CpG position as opposed to a methylation state. Accordingly the term methylation status or methylation state should also be taken to mean a value reflecting the degree of methylation at a CpG position. Unless specifically stated the terms “hypermethylated” or “upmethylated” shall be taken to mean a methylation level above that of a specified cut-off point, wherein said cut-off may be a value representing the average or median methylation level for a given population, or is preferably an optimized cut-off level. The “cut-off' is also referred herein as a “threshold”. In the context of the present invention the terms “methylated”, “hypermethylated” or “upmethylated” shall be taken to include a methylation level above the cut-off be zero (0) % (or equivalents thereof) methylation for all CpG positions within and associated with (e.g. in promoter or regulatory regions) the Septin 9 gene.

[0093] According to the present invention, determination of the methylation status of CpG dinucleotide sequences within SEQ ID NO: 1 to 7 has utility both in the diagnosis and characterization of cellular proliferative disorders.

[0094] Methylation Assay Procedures

[0095] Various methylation assay procedures are known in the art, and can be used in conjunction with the present invention. These assays allow for determination of the methylation state of one or a plurality of CpG dinucleotides (e.g., CpG islands) within a DNA sequence. Such assays involve, among other techniques, DNA sequencing of bisulfite-treated DNA, PCR (for sequence-specific amplification), Southern blot analysis, and Pyrosequencing.

[0096] For example, genomic sequencing has been simplified for analysis of DNA methylation patterns and 5-methylcytosine distribution by using bisulfite treatment (Frommer et al., Proc. Natl. Acad. Sci. USA 89:1827-1831, 1992). Additionally, restriction enzyme digestion of PCR products amplified from bisulfite-converted DNA is used, e.g., the method described by Sadri & Hornsby (Nucl. Acids Res. 24:5058-5059, 1996), or COBRA (Combined Bisulfite Restriction Analysis) (Xiong & Laird, Nucleic Acids Res. 25:2532-2534, 1997).

[0097] It is particularly preferred that said reagent converts cytosine bases which are unmethylated at the 5′-position to uracil, thymine, or another base which is dissimilar to cytosine in terms of hybridization behavior. However in an alternative embodiment said reagent may be a methylation sensitive restriction enzyme.

[0098] Wherein the preserved genomic DNA sample is treated in such a manner that cytosine bases which are unmethylated at the 5′-position are converted to uracil, thymine, or another base which is dissimilar to cytosine in terms of hybridization behavior It is preferred that this treatment is carried out with bisulfite (hydrogen sulfite, disulfite) and subsequent alkaline hydrolysis. Such a treatment results in the conversion of SEQ ID NO: 8 to 35 and SEQ ID NO: 64 to 91 to SEQ ID NO: 36 to SEQ ID NO: 63 and to SEQ ID NO: 92 to 119, respectively.

[0099] The treated preserved genomic DNA is then analyzed in order to determine the methylation state of the target gene sequences. It is particularly preferred that the target region comprises, or hybridizes under stringent conditions to at least 16 contiguous nucleotides of Septin 9 or its truncated transcript Q9HC74, PITX2, SHOX2, GSTPi, and RASSF2a. It is preferred that the sequence of said gene according to SEQ ID NO: 1 to 7 is analyzed. The method of analysis may be selected from those known in the art, including those listed herein. Particularly preferred are MethyLight, MSP and the use of blocking oligonucleotides (HeavyMethyl) as described herein. It is further preferred that any oligonucleotides used in such analysis (including primers, blocking oligonucleotides and detection probes) should be reverse complementary, identical, or hybridize under stringent or highly stringent conditions to an at least 16-base-pair long segment of the base sequences of one or more of SEQ ID NO: 36-63 and SEQ ID NO: 92-119 and sequences complementary thereto.

[0100] Aberrant methylation, more specifically hypermethylation of Septin 9, Q9HC74, PITX2, SHOX2, GSTPi, and RASSF2A (including their truncated transcript, as well as promoter and/or regulatory regions) is associated with the presence of neoplastic cellular proliferative disorders, and is particularly prevalent in colorectal and hepatocellular (Septin9 and Q9HC74), lung (SHOX2), breast (PITX2), prostate (GSTPi) and colon and prostate (RASSF2A) and pro carcinomas. Accordingly wherein a biological sample presents within any degree of methylation, said sample should be determined as neoplastic.

[0101] Another aspect of the invention relates to a kit for use in methylation analysis.

[0102] Further Improvements

[0103] The present invention provides novel uses for the preserved genomic sequence SEQ ID No. 8 to 119. Additional embodiments provide modified variants of SEQ ID NO: 8 to 119, as well as oligonucleotides and/or pna-oligomers for analysis of cytosine methylation patterns within SEQ ID NO: 1 TO 7.

[0104] An objective of the invention comprises analysis of the methylation state of one or more CpG dinucleotides within SEQ ID NO: 1 TO 7 and sequences complementary thereto.

[0105] The disclosed invention provides preserved nucleic acids and treated preserved nucleic acids, derived from genomic SEQ ID NO: 1 to SEQ ID NO: 7, wherein preservation occurs by an enzyme or series of an enzymes that adds a methyl group to a cytosine outside of a CpG dinucleotide sequence and wherein the treatment of preserved nucleic acid is suitable to convert at least one unmethylated cytosine base of the genomic DNA sequence to uracil or another base that is detectably dissimilar to cytosine in terms of hybridization. The genomic sequences in question may comprise one, or more consecutive methylated CpG positions. Said preservation preferably comprises use of AluI Methyltransferase, HaeIII Methyltransferase, MspI Methyltransferase and DNMT2. Said treatment preferably comprises use of a reagent selected from the group consisting of bisulfite, hydrogen sulfite, disulfite, and combinations thereof In a preferred embodiment of the invention, the invention provides a non-naturally occurring modified nucleic acid comprising a sequence of at least 16 contiguous nucleotide bases in length of a sequence selected from the group consisting of SEQ ID NO: 8 TO SEQ ID NO: 119. In further preferred embodiments of the invention said nucleic acid is at least 50, 100, 150, 200, 250 or 500 base pairs in length of a segment of the nucleic acid sequence disclosed in SEQ ID NO: 8 to SEQ ID NO: 119. Particularly preferred is a nucleic acid molecule that is not identical or complementary to all or a portion of the sequences SEQ ID NO: 8 to SEQ ID NO: 119 but not SEQ ID NO: 1 to SEQ ID NO: 7 or other naturally occurring DNA.

[0106] It is preferred that said sequence comprises at least one CpG, TpA or CpA dinucleotide and sequences complementary thereto. The sequences of SEQ ID NO: 8 TO SEQ ID NO: 119 provide non-naturally occurring modified versions of the nucleic acid according to SEQ ID NO: 1 TO SEQ ID NO: 7, wherein the modification of each genomic sequence results in the synthesis of a nucleic acid having a sequence that is unique and distinct from said genomic sequence as follows.

[0107] Significantly, heretofore, the nucleic acid sequences and molecules according SEQ ID NO: 8 to SEQ ID NO: 119 were not implicated in or connected with the detection, classification or treatment of cellular proliferative disorders.

[0108] In an alternative preferred embodiment, the invention further provides oligonucleotides or oligomers suitable for use in the methods of the invention for detecting the cytosine methylation state. Said oligonucleotide or oligomer comprising a nucleic acid sequence having a length of at least nine (9) nucleotides which is identical to, hybridizes, under moderately stringent or stringent conditions (as defined herein above), to a treated nucleic acid sequence according to SEQ ID NO: 36-63 to SEQ ID NO: 92-119 and/or sequences complementary thereto, or to a genomic sequence according to SEQ ID NO: 36-63 to SEQ ID NO: 92-119 and/or sequences complementary thereto.

[0109] Thus, the present invention includes nucleic acid molecules (e.g., oligonucleotides and peptide nucleic acid (PNA) molecules (PNA-oligomers)) that hybridize under moderately stringent and/or stringent hybridization conditions to all or a portion of the sequences SEQ ID NO: 36-63 to SEQ ID NO: 92-119 or to the complements thereof Particularly preferred is a nucleic acid molecule that hybridizes under moderately stringent and/or stringent hybridization conditions to all or a portion of the sequences SEQ ID NO: 36-63 to SEQ ID NO: 92-119 but not SEQ ID NO: 1 to SEQ ID NO: 7 or other human genomic DNA.

[0110] The identical or hybridizing portion of the hybridizing nucleic acids is typically at least 9, 16, 20, 25, 30 or 35 nucleotides in length. However, longer molecules have inventive utility, and are thus within the scope of the present invention.

[0111] Preferably, the hybridizing portion of the inventive hybridizing nucleic acids is at least 95%, or at least 98%, or 100% identical to the sequence, or to a portion thereof of SEQ ID NO: 36-63 to SEQ ID NO: 92-119, or to the complements thereof.

[0112] Hybridizing nucleic acids of the type described herein can be used, for example, as a primer (e.g., a PCR primer), or a diagnostic and/or prognostic probe or primer. Preferably, hybridization of the oligonucleotide probe to a nucleic acid sample is performed under stringent conditions and the probe is 100% identical to the target sequence. Nucleic acid duplex or hybrid stability is expressed as the melting temperature or Tm, which is the temperature at which a probe dissociates from a target DNA. This melting temperature is used to define the required stringency conditions.

[0113] For target sequences that are related and substantially identical to the corresponding sequence of SEQ ID NO: 36-63 to SEQ ID NO: 92-119 (such as allelic variants and SNPs), rather than identical, it is useful to first establish the lowest temperature at which only homologous hybridization occurs with a particular concentration of salt (e.g., SSC or SSPE). Then, assuming that 1% mismatching results in a 1° C. decrease in the Tm, the temperature of the final wash in the hybridization reaction is reduced accordingly (for example, if sequences having >95% identity with the probe are sought, the final wash temperature is decreased by 5° C.). In practice, the change in Tm can be between 0.5° C. and 1.5° C. per 1% mismatch.

[0114] Examples of inventive oligonucleotides of length X (in nucleotides), as indicated by polynucleotide positions with reference to, e.g., SEQ ID NO: 1, include those corresponding to sets (sense and antisense sets) of consecutively overlapping oligonucleotides of length X, where the oligonucleotides within each consecutively overlapping set (corresponding to a given X value) are defined as the finite set of Z oligonucleotides from nucleotide positions:

[0115] n to (n+(X−1));

[0116] where n=1, 2, 3, . . . (Y−(X−1));

[0117] where Y equals the length (nucleotides or base pairs) of SEQ ID NO: 1 (1405);

[0118] where X equals the common length (in nucleotides) of each oligonucleotide in the set (e.g., X=20 for a set of consecutively overlapping 20-mers); and

[0119] where the number (Z) of consecutively overlapping oligomers of length X for a given SEQ ID NO of length Y is equal to Y−(X−1). For example Z=1405−19=1386 for either sense or antisense sets of SEQ ID NO: 1, where X=20.

[0120] Preferably, the set is limited to those oligomers that comprise at least one CpG, TpG or CpA dinucleotide.

[0121] Examples of inventive 20-mer oligonucleotides include the following set of 2,261 oligomers (and the antisense set complementary thereto), indicated by polynucleotide positions with reference to SEQ ID NO: 1:

[0122] 1-20, 2-21, 3-22, 4-23, 5-24, . . . and 1387-1405.

[0123] Preferably, the set is limited to those oligomers that comprise at least one CpG, TpG or CpA dinucleotide.

[0124] Likewise, examples of inventive 25-mer oligonucleotides include the following set of 2,256 oligomers (and the antisense set complementary thereto), indicated by polynucleotide positions with reference to SEQ ID NO: 1:

[0125] 1-25, 2-26, 3-27, 4-28, 5-29, . . . and 1383-1405.

[0126] Preferably, the set is limited to those oligomers that comprise at least one CpG, TpG or CpA dinucleotide.

[0127] The present invention encompasses, for each of SEQ ID NO: 36-63 to SEQ ID NO: 92-119 (sense and antisense), multiple consecutively overlapping sets of oligonucleotides or modified oligonucleotides of length X, where, e.g., X=9, 10, 17, 20, 22, 23, 25, 27, 30 or 35 nucleotides.

[0128] The oligonucleotides or oligomers according to the present invention constitute effective tools useful to ascertain genetic and epigenetic parameters of the genomic sequence corresponding to SEQ ID NO: 1. Preferred sets of such oligonucleotides or modified oligonucleotides of length X are those consecutively overlapping sets of oligomers corresponding to SEQ ID NO: 36-63 to SEQ ID NO: 92-119 (and to the complements thereof). Preferably, said oligomers comprise at least one CpG, TpG or CpA dinucleotide.

[0129] Particularly preferred oligonucleotides or oligomers according to the present invention are those in which the cytosine of the CpG dinucleotide (or of the corresponding converted TpG or CpA dinucleotide) sequences is within the middle third of the oligonucleotide; that is, where the oligonucleotide is, for example, 13 bases in length, the CpG, TpG or CpA dinucleotide is positioned within the fifth to ninth nucleotide from the 5′-end.

[0130] The oligonucleotides of the invention can also be modified by chemically linking the oligonucleotide to one or more moieties or conjugates to enhance the activity, stability or detection of the oligonucleotide. Such moieties or conjugates include chromophores, fluorophors, lipids such as cholesterol, cholic acid, thioether, aliphatic chains, phospholipids, polyamines, polyethylene glycol (PEG), palmityl moieties, and others as disclosed in, for example, U.S. Pat. Nos. 5,514,758, 5,565,552, 5,567,810, 5,574,142, 5,585,481, 5,587,371, 5,597,696 and 5,958,773. The probes may also exist in the form of a PNA (peptide nucleic acid) which has particularly preferred pairing properties. Thus, the oligonucleotide may include other appended groups such as peptides, and may include hybridization-triggered cleavage agents (Krol et al., BioTechniques 6:958-976, 1988) or intercalating agents (Zon, Pharm. Res. 5:539-549, 1988). To this end, the oligonucleotide may be conjugated to another molecule, e.g., a chromophore, fluorophor, peptide, hybridization-triggered cross-linking agent, transport agent, hybridization-triggered cleavage agent, etc.

[0131] The oligonucleotide may also comprise at least one art-recognized modified sugar and/or base moiety, or may comprise a modified backbone or non-natural internucleoside linkage.

[0132] The oligonucleotides or oligomers according to particular embodiments of the present invention are typically used in ‘sets,’ which contain at least one oligomer for analysis of each of the CpG dinucleotides of a genomic sequence selected from the group consisting SEQ ID NO: 1 to SEQ ID NO: 7 and sequences complementary thereto, or to the corresponding CpG, TpG or CpA dinucleotide within a sequence of the preserved and treated nucleic acids according to SEQ ID NO: 36-63 to SEQ ID NO: 92-119. However, it is anticipated that for economic or other factors it may be preferable to analyse a limited selection of the CpG dinucleotides within said sequences, and the content of the set of oligonucleotides is altered accordingly.

[0133] Therefore, in particular embodiments, the present invention provides a set of at least two (2) (oligonucleotides and/or PNA-oligomers) useful for detecting the cytosine methylation state in preserved and treated genomic SEQ ID NO: 36-63 to SEQ ID NO: 92-119. These probes enable diagnosis, classification and/or therapy of genetic and epigenetic parameters of liver and/or colorectal cell proliferative disorders. The set of oligomers may also be used for detecting single nucleotide polymorphisms (SNPs) in preserved and treated genomic DNA SEQ ID NO: 36-63 to SEQ ID NO: 92-119.

[0134] In preferred embodiments, at least one, and more preferably all members of a set of oligonucleotides is bound to a solid phase.

[0135] In further embodiments, the present invention provides a set of at least two (2) oligonucleotides that are used as ‘primer’ oligonucleotides for amplifying DNA sequences of one of SEQ ID NO: 36-63 to SEQ ID NO: 92-119 and sequences complementary thereto, or segments thereof.

[0136] It is anticipated that the oligonucleotides may constitute all or part of an “array” or “DNA chip” (i.e., an arrangement of different oligonucleotides and/or PNA-oligomers bound to a solid phase). Such an array of different oligonucleotide- and/or PNA-oligomer sequences can be characterized, for example, in that it is arranged on the solid phase in the form of a rectangular or hexagonal lattice. The solid-phase surface may be composed of silicon, glass, polystyrene, aluminium, steel, iron, copper, nickel, silver, or gold. Nitrocellulose as well as plastics such as nylon, which can exist in the form of pellets or also as resin matrices, may also be used. An overview of the Prior Art in oligomer array manufacturing can be gathered from a special edition of Nature Genetics (Nature Genetics Supplement, Volume 21, January 1999, and from the literature cited therein). Fluorescently labelled probes are often used for the scanning of immobilized DNA arrays. The simple attachment of Cy3 and Cy5 dyes to the 5′-OH of the specific probe is particularly suitable for fluorescence labels. The detection of the fluorescence of the hybridised probes may be carried out, for example, via a confocal microscope. Cy3 and Cy5 dyes, besides many others, are commercially available.

[0137] It is also anticipated that the oligonucleotides, or particular sequences thereof, may constitute all or part of an “virtual array” wherein the oligonucleotides, or particular sequences thereof, are used, for example, as ‘specifiers’ as part of, or in combination with a diverse population of unique labeled probes to analyze a complex mixture of analytes. Such a method, for example is described in US 2003/0013091 (U.S. Ser. No. 09/898,743, published 16 Jan. 2003). In such methods, enough labels are generated so that each nucleic acid in the complex mixture (i.e., each analyte) can be uniquely bound by a unique label and thus detected (each label is directly counted, resulting in a digital read-out of each molecular species in the mixture).

[0138] It is particularly preferred that the oligomers according to the invention are utilized for at least one of: detection of detection and differentiation between or among subclasses of diagnosis of prognosis of treatment of monitoring of and treatment and monitoring of liver and/or colorectal cell proliferative disorders. This is enabled by use of said sets for the detection or detection and differentiation of one or more of the following classes of tissues: colorectal carcinoma, colon adenoma, inflammatory colon tissue, grade 2 dysplasia colon adenomas less than 1 cm, grade 3 dysplasia colon adenomas larger than 1 cm, normal colon tissue, non-colon healthy tissue and non-colon cancer tissue.

[0139] Particularly preferred are those sets of oligomers according to the Examples.

[0140] In the most preferred embodiment of the method, the presence or absence of a cellular proliferative disorder, most preferably a neoplastic cellular proliferation or differentiation thereof from benign disorders is determined. This is achieved by analysis of the methylation status of at least one target sequence comprising at least one CpG position said sequence comprising, or hybridizing under stringent conditions to at least 16 contiguous nucleotides of a sequence selected from the group consisting SEQ ID NO: 1 to SEQ ID NO:7 and complements thereof. The present invention further provides a method for ascertaining genetic and/or epigenetic parameters of the genomic sequence according to SEQ ID NO: 1 to SEQ ID NO: 7 within a subject by analyzing cytosine methylation and single nucleotide polymorphisms. Said method comprising contacting a nucleic acid comprising SEQ ID NO: 1 to SEQ ID NO: 7 in a biological sample obtained from said subject with an enzyme or series of enzyme that adds a methyl group to a cytosine group outside of a CpG dinucleotide sequence and then further treating the said nucleic acid with at least one reagent or a series of reagents, wherein said reagent or series of reagents, distinguishes between methylated and non-methylated CpG dinucleotides within the target nucleic acid.

[0141] In a preferred embodiment, said method comprises the following steps: In the first step, a sample of the tissue to be analyzed is obtained. The source may be any suitable source, such as cell lines, histological slides, biopsies, paraffin-embedded tissue, body fluids, stool, colonic effluent, urine, blood plasma, blood serum, whole blood, isolated blood cells, cells isolated from the blood and all possible combinations thereof. It is preferred that said sources of DNA are stool or body fluids selected from the group consisting colonic effluent, urine, blood plasma, blood serum, whole blood, isolated blood cells, cells isolated from the blood.

[0142] The genomic DNA is then isolated from the sample. Genomic DNA may be isolated by any means standard in the art, including the use of commercially available kits. Briefly, wherein the DNA of interest is encapsulated in by a cellular membrane the biological sample must be disrupted and lysed by enzymatic, chemical or mechanical means. The DNA solution may then be cleared of proteins and other contaminants e.g. by digestion with proteinase K. The genomic DNA is then recovered from the solution. This may be carried out by means of a variety of methods including salting out, organic extraction or binding of the DNA to a solid phase support. The choice of method will be affected by several factors including time, expense and required quantity of DNA.

[0143] Wherein the sample DNA is not enclosed in a membrane (e.g. circulating DNA from a blood sample) methods standard in the art for the isolation and/or purification of DNA may be employed. Such methods include the use of a protein degenerating reagent e.g. chaotropic salt e.g. guanidine hydrochloride or urea; or a detergent e.g. sodium dodecyl sulphate (SDS), cyanogen bromide. Alternative methods include but are not limited to ethanol precipitation or propanol precipitation, vacuum concentration amongst others by means of a centrifuge. The person skilled in the art may also make use of devices such as filter devices e.g.ultrafiltration, silica surfaces or membranes, magnetic particles, polystyrol particles, polystyrol surfaces, positively charged surfaces, and positively charged membranes, charged membranes, charged surfaces, charged switch membranes, charged switched surfaces.

[0144] Once the nucleic acids have been extracted, the genomic double stranded DNA is used in the analysis.

[0145] In the second step of the method, the said genomic DNA of invention is then treated with an enzyme or series of enzymes that adds a methyl group to a cytosine outside of CpG dinucleotide sequences of the said genomic DNA, or a fragment thereof. The enzymes of the invention are selected so that they do not add a methyl group to a cytosine within the CpG dinucleotide sequences of the genomic DNA. In a preferred embodiment these enzymes are selected from a group comprising AluI Methyltransferase, HaeIII Methyltransferase, MspI Methyltransferase, and DNMT2. The genomic DNA of the invention can be treated with any enzyme with the above said characteristics and by any means standard in the art from natural origin or isolated. It is preferred that the said enzymes are isolated and purified from certain bacteria or viruses by any means standard in the art. Further, it is preferred that the said enzymes are purchased from a provider. However, enzymes with said characteristics can specifically be designed. At least one advantage of using these enzymes is addition of a methyl group at a precise location. AluI Methyltransferase adds a methyl group to a cytosine in the 5′ . . . agCt . . . 3′ and to its reverse complement 3′ . . . tCga . . . 5′. HaeIII Methyltransferase adds a methyl group to the middle cytosine in the 5′ . . . ggCc . . . 3′ and to its reverse complement 3′ . . . cCgg . . . 5′. MspI Methyltransferase recognizes 5′ . . . Ccgg . . . 3′ and its reverse complement 3′ . . . ggcC . . . 5′ sequence and adds a methyl group to a cytosine as shown in capital letter. Finally DNMT2 enzyme recognizes CpA and CpT dinucleotide sequences and methylates the cytosines in these sequences.

[0146] In the third step of the method, the preserved genomic DNA sample is then treated in such a manner that cytosine bases which are unmethylated at the 5′-position are converted to uracil, thymine, or another base which is dissimilar to cytosine in terms of hybridization behavior. This is preferably achieved by means of treatment with a bisulfite reagent. The term “bisulfite reagent” refers to a reagent comprising bisulfite, disulfite, hydrogen sulfite or combinations thereof, useful as disclosed herein to distinguish between methylated and unmethylated CpG dinucleotide sequences. Methods of said treatment are known in the art (e.g. PCT/EP2004/011715, which is incorporated by reference in its entirety). It is preferred that the bisulfite treatment is conducted in the presence of denaturing solvents such as but not limited to n-alkylenglycol, particularly diethylene glycol dimethyl ether (DME), or in the presence of dioxane or dioxane derivatives. In a preferred embodiment the denaturing solvents are used in concentrations between 1% and 35% (v/v). It is also preferred that the bisulfite reaction is carried out in the presence of scavengers such as but not limited to chromane derivatives, e.g., 6-hydroxy-2,5,7,8,-tetramethylchromane 2-carboxylic acid or trihydroxybenzoe acid and derivates thereof, e.g. Gallic acid (see: PCT/EP2004/011715 which is incorporated by reference in its entirety). The bisulfite conversion is preferably carried out at a reaction temperature between 30° C. and 70° C., whereby the temperature is increased to over 85° C. for short periods of times during the reaction (see: PCT/EP2004/011715 which is incorporated by reference in its entirety). The bisulfite treated DNA is preferably purified prior to the quantification. This may be conducted by any means known in the art, such as but not limited to ultrafiltration, preferably carried out by means of Microcon™ columns (manufactured by Millipore™). The purification is carried out according to a modified manufacturer's protocol (see: PCT/EP2004/011715 which is incorporated by reference in its entirety).

[0147] In the fourth step of the method, fragments of the treated DNA are amplified, using sets of primer oligonucleotides according to the present invention, and an amplification enzyme. The amplification of several DNA segments can be carried out simultaneously in one and the same reaction vessel. Typically, the amplification is carried out using a polymerase chain reaction (PCR). Preferably said amplificates are 100 to 2,000 base pairs in length. The set of primer oligonucleotides includes at least two oligonucleotides whose sequences are each reverse complementary, identical, or hybridize under stringent or highly stringent conditions to an at least 16-base-pair long segment of the base sequences of one of SEQ ID NO: 36-63 to SEQ ID NO: 92-119 and sequences complementary thereto.

[0148] In an alternate embodiment of the method, the methylation status of pre-selected CpG positions within the nucleic acid sequences according to SEQ ID NO: 1 to 7 may be detected by use of methylation-specific primer oligonucleotides. This technique (MSP) has been described in U.S. Pat. No. 6,265,171 to Herman. The use of methylation status specific primers for the amplification of bisulfite treated DNA allows the differentiation between methylated and unmethylated nucleic acids. MSP primers pairs contain at least one primer which hybridizes to a bisulfite treated CpG dinucleotide. Therefore, the sequence of said primers comprises at least one CpG dinucleotide. MSP primers specific for non-methylated DNA contain a “T’ at the position of the C position in the CpG. Preferably, therefore, the base sequence of said primers is required to comprise a sequence having a length of at least 9 nucleotides which hybridizes to a preserved and treated nucleic acid sequence according to one of SEQ ID NO: 36-63 to SEQ ID NO: 92-119 and sequences complementary thereto, wherein the base sequence of said oligomers comprises at least one CpG dinucleotide. A further preferred embodiment of the method comprises the use of blocker oligonucleotides (the HeavyMethyl™ assay). The use of such blocker oligonucleotides has been described by Yu et al., BioTechniques 23:714-720, 1997. Blocking probe oligonucleotides are hybridized to the bisulfite treated nucleic acid concurrently with the PCR primers. PCR amplification of the nucleic acid is terminated at the 5′ position of the blocking probe, such that amplification of a nucleic acid is suppressed where the complementary sequence to the blocking probe is present. The probes may be designed to hybridize to the bisulfite treated nucleic acid in a methylation status specific manner. For example, for detection of methylated nucleic acids within a population of unmethylated nucleic acids, suppression of the amplification of nucleic acids which are unmethylated at the position in question would be carried out by the use of blocking probes comprising a ‘CpA’ or ‘TpA’ at the position in question, as opposed to a ‘CpG’ if the suppression of amplification of methylated nucleic acids is desired.

[0149] For PCR methods using blocker oligonucleotides, efficient disruption of polymerase-mediated amplification requires that blocker oligonucleotides not be elongated by the polymerase. Preferably, this is achieved through the use of blockers that are 3′-deoxyoligonucleotides, or oligonucleotides derivitized at the 3′ position with other than a “free” hydroxyl group. For example, 3′-O-acetyl oligonucleotides are representative of a preferred class of blocker molecule.

[0150] Additionally, polymerase-mediated decomposition of the blocker oligonucleotides should be precluded. Preferably, such preclusion comprises either use of a polymerase lacking 5′-3′ exonuclease activity, or use of modified blocker oligonucleotides having, for example, thioate bridges at the 5′-terminii thereof that render the blocker molecule nuclease-resistant. Particular applications may not require such 5′ modifications of the blocker. For example, if the blocker- and primer-binding sites overlap, thereby precluding binding of the primer (e.g., with excess blocker), degradation of the blocker oligonucleotide will be substantially precluded. This is because the polymerase will not extend the primer toward, and through (in the 5′-3′ direction) the blocker—a process that normally results in degradation of the hybridized blocker oligonucleotide.

[0151] A particularly preferred blocker/PCR embodiment, for purposes of the present invention and as implemented herein, comprises the use of peptide nucleic acid (PNA) oligomers as blocking oligonucleotides. Such PNA blocker oligomers are ideally suited, because they are neither decomposed nor extended by the polymerase.

[0152] Preferably, therefore, the base sequence of said blocking oligonucleotides is required to comprise a sequence having a length of at least 9 nucleotides which hybridizes to a treated nucleic acid sequence according to one of SEQ ID NO: 36-63 to SEQ ID NO: 92-119 and sequences complementary thereto, wherein the base sequence of said oligonucleotides comprises at least one CpG, TpG or CpA dinucleotide.

[0153] The fragments obtained by means of the amplification can carry a directly or indirectly detectable label. Preferred are labels in the form of fluorescence labels, radionuclides, or detachable molecule fragments having a typical mass which can be detected in a mass spectrometer. Where said labels are mass labels, it is preferred that the labeled amplificates have a single positive or negative net charge, allowing for better delectability in the mass spectrometer. The detection may be carried out and visualized by means of, e.g., matrix assisted laser desorption/ionization mass spectrometry (MALDI) or using electron spray mass spectrometry (ESI).

[0154] Matrix Assisted Laser Desorption/Ionization Mass Spectrometry (MALDI-TOF) is a very efficient development for the analysis of biomolecules (Karas & Hillenkamp, Anal Chem., 60:2299-301, 1988). An analyte is embedded in a light-absorbing matrix. The matrix is evaporated by a short laser pulse thus transporting the analyte molecule into the vapor phase in an unfragmented manner. The analyte is ionized by collisions with matrix molecules. An applied voltage accelerates the ions into a field-free flight tube. Due to their different masses, the ions are accelerated at different rates. Smaller ions reach the detector sooner than bigger ones. MALDI-TOF spectrometry is well suited to the analysis of peptides and proteins. The analysis of nucleic acids is somewhat more difficult (Gut & Beck, Current Innovations and Future Trends, 1:147-57, 1995). The sensitivity with respect to nucleic acid analysis is approximately 100-times less than for peptides, and decreases disproportionally with increasing fragment size. Moreover, for nucleic acids having a multiply negatively charged backbone, the ionization process via the matrix is considerably less efficient. In MALDI-TOF spectrometry, the selection of the matrix plays an eminently important role. For desorption of peptides, several very efficient matrixes have been found which produce a very fine crystallization. There are now several responsive matrixes for DNA; however, the difference in sensitivity between peptides and nucleic acids has not been reduced. This difference in sensitivity can be reduced, however, by chemically modifying the DNA in such a manner that it becomes more similar to a peptide. For example, phosphorothioate nucleic acids, in which the usual phosphates of the backbone are substituted with thiophosphates, can be converted into a charge-neutral DNA using simple alkylation chemistry (Gut & Beck, Nucleic Acids Res. 23: 1367-73, 1995). The coupling of a charge tag to this modified DNA results in an increase in MALDI-TOF sensitivity to the same level as that found for peptides. A further advantage of charge tagging is the increased stability of the analysis against impurities, which makes the detection of unmodified substrates considerably more difficult.

[0155] In the fifth step of the method, the amplificates obtained during the fourth step of the method are analyzed in order to ascertain the methylation status of the CpG dinucleotides prior to the treatment.

[0156] In embodiments where the amplificates were obtained by means of MSP amplification, the presence or absence of an amplificate is in itself indicative of the methylation state of the CpG positions covered by the primer, according to the base sequences of said primer.

[0157] Amplificates obtained by means of both standard and methylation specific PCR may be further analyzed by means of based-based methods such as, but not limited to; array technology and probe based technologies as well as by means of techniques such as sequencing and template directed extension.

[0158] In one embodiment of the method, the amplificates synthesized in step four are subsequently hybridized to an array or a set of oligonucleotides and/or PNA probes. In this context, the hybridization takes place in the following manner the set of probes used during the hybridization is preferably composed of at least 2 oligonucleotides or PNA-oligomers; in the process, the amplificates serve as probes which hybridize to oligonucleotides previously bonded to a solid phase; the non-hybridized fragments are subsequently removed; said oligonucleotides contain at least one base sequence having a length of at least 9 nucleotides which is reverse complementary or identical to a segment of the base sequences specified in the present Sequence Listing; and the segment comprises at least one CpG , TpG or CpA dinucleotide. The hybridizing portion of the hybridizing nucleic acids is typically at least 9, 15, 20, 25, 30 or 35 nucleotides in length. However, longer molecules have inventive utility, and are thus within the scope of the present invention.

[0159] In a preferred embodiment, said dinucleotide is present in the central third of the oligomer. For example, wherein the oligomer comprises one CpG dinucleotide, said dinucleotide is preferably the fifth to ninth nucleotide from the 5′-end of a 13-mer. One oligonucleotide exists for the analysis of each CpG dinucleotide within a sequence selected from the group consisting SEQ ID NO: 36-63 to SEQ ID NO: 92-119. Said oligonucleotides may also be present in the form of peptide nucleic acids. The non-hybridized amplificates are then removed. The hybridized amplificates are then detected. In this context, it is preferred that labels attached to the amplificates are identifiable at each position of the solid phase at which an oligonucleotide sequence is located.

[0160] In yet a further embodiment of the method, the genomic methylation status of the CpG positions may be ascertained by means of oligonucleotide probes (as detailed above) that are hybridized to the bisulfite treated DNA concurrently with the PCR amplification primers (wherein said primers may either be methylation specific or standard).

[0161] A particularly preferred embodiment of this method is the use of fluorescence-based Real Time Quantitative PCR (Heid et al., Genome Res. 6:986-994, 1996; also see U.S. Pat. No. 6,331,393) employing a dual-labeled fluorescent oligonucleotide probe (TaqMan™ PCR, using an ABI Prism 7700 Sequence Detection System, Perkin Elmer Applied Biosystems, Foster City, Calif.). The TaqMan™ PCR reaction employs the use of a non-extendible interrogating oligonucleotide, called a TaqMan™ probe, which, in preferred embodiments, is designed to hybridize to a CpG-rich sequence located between the forward and reverse amplification primers. The TaqMan™ probe further comprises a fluorescent “reporter moiety” and a “quencher moiety” covalently bound to linker moieties (e.g., phosphoramidites) attached to the nucleotides of the TaqMan™ oligonucleotide. For analysis of methylation within nucleic acids subsequent to bisulfite treatment, it is required that the probe be methylation specific, as described in U.S. Pat. No. 6,331,393, (hereby incorporated by reference in its entirety) also known as the MethyLight™ assay. Variations on the TaqMan™ detection methodology that are also suitable for use with the described invention include the use of dual-probe technology (Lightcycler™) or fluorescent amplification primers (Sunrise™ technology). Both these techniques may be adapted in a manner suitable for use with bisulfite treated DNA, and moreover for methylation analysis within CpG dinucleotides.

[0162] In a further preferred embodiment of the method, the fifth step of the method comprises the use of template-directed oligonucleotide extension, such as MS-SNuPE as described by Gonzalgo & Jones, Nucleic Acids Res. 25:2529-2531, 1997.

[0163] In yet a further embodiment of the method, the fifth step of the method comprises sequencing and subsequent sequence analysis of the amplificate generated in the fourth step of the method (Sanger F., et al., Proc Natl Acad Sci USA 74:5463-5467, 1977).

[0164] Subsequent to the determination of the methylation state or level of the genomic nucleic acids the presence, absence or class of cellular proliferative disorder is deduced based upon the methylation state or level of at least one CpG dinucleotide sequence of SEQ ID NO: 1 to 7, or an average, or a value reflecting an average methylation state of a plurality of CpG dinucleotide sequences of SEQ ID NO: 1 to 7 wherein methylation is associated with a neoplastic or pre-neoplastic cellular proliferative disorder. Wherein said methylation is determined by quantitative means the cut-off point for determining said the presence of methylation is preferably zero (i.e. wherein a sample displays any degree of methylation it is determined as having a methylated status at the analyzed CpG position). Nonetheless, it is foreseen that the person skilled in the art may wish to adjust said cut-off value in order to provide an assay of a particularly preferred sensitivity or specificity. Accordingly said cut-off value may be increased (thus increasing the specificity); said cut off value may be within a range selected form the group consisting of 0%-5%, 5%-10%, 10%-15%, 15%-20%, 20%-30% and 30%-50%. Particularly preferred are the cut-offs 10%, 15%, 25%, and 30%.

[0165] Diagnostic and Prognostic Assays for Cellular Proliferative Disorders

[0166] The present invention enables diagnosis of events which are disadvantageous to patients or individuals in which important genetic and/or epigenetic parameters within Septin 9, Q9HC74, PITX2, SHOX2, GSTPi, and RASSF2A may be used as markers. Said parameters obtained by means of the present invention may be compared to another set of genetic and/or epigenetic parameters, the differences serving as the basis for a diagnosis and/or prognosis of events which are disadvantageous to patients or individuals.

[0167] More specifically the present invention enables the screening of at-risk populations for the early detection of cancers, most preferably liver cancer and/or colorectal carcinomas. Furthermore, the present invention enables the differentiation of neoplastic (e.g. malignant) from benign (i.e. non-cancerous) cellular proliferative disorders. For example, it enables the differentiation of a colorectal carcinoma from small colon adenomas or polyps. Neoplastic cellular proliferative disorders present decreased methylation (i.e. decreased expression) within the Septin 9 gene, as opposed to said benign disorders which do not.

[0168] In particular preferred embodiments, inventive oligomers are used to assess the CpG dinucleotide methylation status or arrays thereof, as well as in kits based thereon and useful for the diagnosis and/or classification of cellular proliferative disorders.

[0169] Kits

[0170] Another aspect of the present invention relates to kits suitable for performing the methods of the present invention comprising (a) an enzyme or series of enzymes that adds a methyl group to a cytosine outside of the CpG dinucleotide sequences of the said genomic DNA, or a fragment thereof (b) containers suitable for containing the said enzyme and the biological sample of the patient; and optionally (c) instructions for use and interpretation of the kit results. It is further preferred that the kits further comprising one or more reagents to convert unmethylated cytosine bases to uracil or to anther base that is detectably dissimilar to cytosine in terms of hybridization properties. It is further preferred that the kits further comprises at least one set of oligonucleotides wherein said oligonucleotides comprises of one or a plurality of nucleic acids or peptide nucleic acids which are identical, are complementary, or hybridize under stringent or highly stringent conditions to at least 9 base long segment of a sequence selected from SEQ ID NOs.: 8-63.

[0171] Moreover, an additional aspect of the present invention is a kit comprising: a means for determining Septin 9, Q9HC74, PITX2, SHOX2, GSTPi, and RASSF2A methylation. The means for determining Septin 9, Q9HC74, PITX2, SHOX2, GSTPi, and RASSF2A methylation comprise preferably an enzyme or series of enzymes that adds a methyl group to a cytosine outside of CpG dinucleotide sequence, a bisulfite-containing reagent; one or a plurality of oligonucleotides consisting whose sequences in each case are identical, are complementary, or hybridise under stringent or highly stringent conditions to a 9 or more preferably 18 base long segment of a sequence selected from SEQ ID NO: SEQ ID NO: 36-63 to SEQ ID NO: 92-119; and optionally instructions for carrying out and evaluating the described method of methylation analysis. In one embodiment the base sequence of said oligonucleotides comprises at least one CpG, CpA or TpG dinucleotide.

[0172] In a further embodiment, said kit may further comprise standard reagents for performing a CpG position-specific methylation analysis, wherein said analysis comprises one or more of the following techniques: MS-SNuPE, MSP, MethyLight™, HeavyMethyl, COBRA, and nucleic acid sequencing. However, a kit along the lines of the present invention can also contain only part of the aforementioned components.

[0173] In a preferred embodiment the kit may comprise additional bisulfite conversion reagents selected from the group consisting: DNA denaturation buffer; sulfonation buffer; DNA recovery reagents or kits (e.g., precipitation, ultrafiltration, affinity column); desulfonation buffer; and DNA recovery components.

[0174] In a further alternative embodiment, the kit may contain, packaged in separate containers, a polymerase and a reaction buffer optimised for primer extension mediated by the polymerase, such as PCR. In another embodiment of the invention the kit further comprising means for obtaining a biological sample of the patient. Preferred is a kit, which further comprises a container suitable for containing the means for determining methylation of the gene Septin 9 in the biological sample of the patient, and most preferably further comprises instructions for use and interpretation of the kit results. In a preferred embodiment the kit comprises: (a) an enzyme or series of enzymes that adds a methyl group to a cytosine outside of CpG dinucleotide sequence (b) a bisulfite reagent; (c) a container suitable for containing the said bisulfite reagent and the biological sample of the patient; (d) at least one oligonucleotide whose sequences is identical, is complementary, or hybridises under stringent or highly stringent conditions to a 9 or more preferably 18 base long segment of a sequence selected from SEQ ID NO: 36-63 to SEQ ID NO: 92-119 and optionally (e) instructions for use and interpretation of the kit results. In an alternative preferred embodiment the kit comprises: (a) an enzyme or series of enzymes that adds a methyl group to a cytosine outside of CpG dinucleotide sequence (b) a bisulfite reagent; (c) a container suitable for containing the said bisulfite reagent and the biological sample of the patient; (d) at least one oligonucleotides and/or PNA-oligomer having a length of at least 9 or 16 nucleotides which is identical to or hybridises to a pre-treated nucleic acid sequence according to one of SEQ ID NO: 36-63 to SEQ ID NO: 92-119 and sequences complementary thereto; and optionally (e) instructions for use and interpretation of the kit results.

[0175] In an alternative embodiment the kit comprises: (a) an enzyme or series of enzymes that adds a methyl group to a cytosine outside of CpG dinucleotide sequence (b) a bisulfite reagent; (c) a container suitable for containing the said bisulfite reagent and the biological sample of the patient; (d) at least one oligonucleotide whose sequences is identical, are complementary, or hybridises under stringent or highly stringent conditions to a 9 or more preferably 18 base long segment of a sequence selected from SEQ ID NO: 36-63 to SEQ ID NO: 92-119; (e) at least one oligonucleotides and/or PNA-oligomer having a length of at least 9 or 16 nucleotides which is identical to or hybridises to a pre-treated nucleic acid sequence according to one of SEQ ID NO: 36-63 to SEQ ID NO: 92-119 and sequences complementary thereto; and optionally (f) instructions for use and interpretation of the kit results.

[0176] The kit may also contain other components such as buffers or solutions suitable for blocking, washing or coating, packaged in a separate container. In a preferred embodiment the enzymes are selected from a group comprising AluI Methyltransferase, HaeIII Methyltransferase, MspI Methyltransferase, and DNMT2.

[0177] Another aspect of the invention relates to a kit for use in determining the presence of and/or distinguishing between cell proliferative disorders, said kit comprising: a means for measuring the level of transcription of the genes Septin 9, Q9HC74, PITX2, SHOX2, GSTPi, and RASSF2A and a means for determining Septin 9, Q9HC74, PITX2, SHOX2, GSTPi, and RASSF2A methylation.

[0178] Typical reagents (e.g., as might be found in a typical COBRA™-based kit) for COBRA™ analysis may include, but are not limited to: PCR primers for Septin 9, Q9HC74, PITX2, SHOX2, GSTPi, and RASSF2A; restriction enzyme and appropriate buffer; gene-hybridization oligo; control hybridization oligo; kinase labeling kit for oligo probe; and labeled nucleotides. Typical reagents (e.g., as might be found in a typical MethyLight™-based kit) for MethyLight™ analysis may include, but are not limited to: PCR primers for the bisulfite converted sequence of the Septin 9, Q9HC74, PITX2, SHOX2, GSTPi, and RASSF2A gene; bisulfite specific probes (e.g. TaqMan™ or Lightcycler™ ); optimized PCR buffers and deoxynucleotides; and Taxᵢ polymerase.

[0179] Typical reagents (e.g., as might be found in a typical Ms-SNuPE™-based kit) for Ms-SNuPE™ analysis may include, but are not limited to: PCR primers for specific gene (or bisulfite treated DNA sequence or CpG island); optimized PCR buffers and deoxynucleotides; gel extraction kit; positive control primers; Ms-SNuPE™ primers for the bisulfite converted sequence of the Septin 9 gene; reaction buffer (for the Ms-SNuPE reaction); and labeled nucleotides.

[0180] Typical reagents (e.g., as might be found in a typical MSP-based kit) for MSP analysis may include, but are not limited to: methylated and unmethylated PCR primers for the bisulfite converted sequence of the Septin 9, Q9HC74, PITX2, SHOX2, GSTPi, and RASSF2A gene, optimized PCR buffers and deoxynucleotides, and specific probes.

[0181] The kit may also contain other components such as buffers or solutions suitable for blocking, washing or coating, packaged in a separate container.

[0182] The kit may further comprise one or several of the following components, which are known in the art for DNA enrichment: a protein component, said protein binding selectively to methylated DNA; a triplex-forming nucleic acid component, one or a plurality of linkers, optionally in a suitable solution; substances or solutions for performing a ligation e.g. ligases, buffers; substances or solutions for performing a column chromatography; substances or solutions for performing an immunology based enrichment (e.g. immunoprecipitation); substances or solutions for performing a nucleic acid amplification e.g. PCR; a dye or several dyes, if applicable with a coupling reagent, if applicable in a solution; substances or solutions for performing hybridization; and/or substances or solutions for performing a washing step.

[0183] The described invention further provides a composition of matter useful for diagnosis, prognosis, monitoring, detecting, differentiation and distinguishing cell proliferative disorders. Said composition comprising at least one nucleic acid 18 base pairs in length of a segment of the nucleic acid sequence disclosed in SEQ ID NO: 8 to SEQ ID NO: 119, and one or more substances taken from the group comprising : 1-5 mM Magnesium Chloride, 100-500 μM dNTP, 0.5-5 units of taq polymerase, bovine serum albumen, an oligomer in particular an oligonucleotide or peptide nucleic acid (PNA)-oligomer, said oligomer comprising in each case at least one base sequence having a length of at least 9 nucleotides which is complementary to, or hybridizes under moderately stringent or stringent conditions to a pretreated genomic DNA according to one of the SEQ ID NO: 36-63 to SEQ ID NO: 92-119 and sequences complementary thereto. It is preferred that said composition of matter comprises a buffer solution appropriate for the stabilization of said nucleic acid in an aqueous solution and enabling polymerase based reactions within said solution. Suitable buffers are known in the art and commercially available.

[0184] In further preferred embodiments of the invention said at least one nucleic acid is at least 50, 100, 150, 200, 250 or 500 base pairs in length of a segment of the nucleic acid sequence disclosed in SEQ ID NO: 36-63 to SEQ ID NO: 92-119.

### Example

[0185] While the present invention has been described with specificity in accordance with certain of its preferred embodiments, the following example serve only to illustrate the invention and are not intended to limit the invention within the principles and scope of the broadest interpretations and equivalent configurations thereof.

### Example 1

[0186] In this example as shown in Table 2, methods for preserving DNA sequence complexity of Septin 9, Q9HC74, PITX2, SHOX2, GSTPi, and RASSF2A genes, SEQ ID NO. 1-7 are shown.

[0187] Treatment of the said genes with an isolated and purified DNMT2 enzyme causes cytosines outside of the CpG dinucleotide sequence, in particular cytosines in the Cp [AT] sequence, to methylate. Further treatment of the said genes with isolated and purified AluI Methyltransferase, HaeIII Methyltransferase, and MspI Methyltransferase methylates cytosines in the agCt, ggCc, Ccgg, respectively. As shown in Table 2, this causes that not all of the unmethylated cytosines to be converted to uracil and ultimately as explained above to thymine after bisulfite treatment, i.e. preserves the complexity of the DNA sequence. For example according to Table 2, Sepin9 sense-strand region has 1229 cytosines and 614 cytosines have been preserved after bisulfite treatment of Cp[AT] methylated Septin9 gene via DNMT2 enzyme and 79 cytosines have been preserved after bisulfite treatment of agCt, ggCc, and Ccgg methylated Septin9 via above-mentioned Methyltransferase enzymes. The preserved cytosines provide the above said advantages.

[0188] See Example 2 for DNA and enzymes extraction, isolation, and purification and bisulfite treatment conditions.

### Example 2

[0189] An assay suitable for the methylation analysis of SEQ ID NO: 1 according to the present invention is designed. The assay was designed to be run on the LightCycler platform (Roche Diagnostics), but other such instruments commonly used in the art are also suitable. The assay was HeavyMethyl assay and the amplificates were designed to be detected by means of Lightcycler style dual probes. Further, a conventional HM assay for the segment of SEQ ID NO.: 1 (SEQ ID NO: 134) was compared with the HM assay according to present invention for the segment of SEQ ID NO.: 1 (SEQ ID NO: 135). For more details refer to FIGS. 1A and 1B.

[0190] DNA Extraction, DNMT2 and Bisulfite Treatment

[0191] Performing the following step:

[0192] Isolating the DNA with QIAGEN Genomic-Tip 500/G or 100/G according to the manufacturer's instructions. Then, preserving and untimely converting the purified genomic DNA via isolated and purified DNMT2 enzyme that adds a methyl group to a cytosine in the Cp[AT] sequences and then with bisulfite. Mixing 2 ug of the DNMT2 treated DNA in 100 ul with 354 μl of bisulfite solution (10.36 g sodium bisulfite & 2.49 g sodium sulfite in 22 ml nuclease-free water) and 146 μl of dioxane containing a radical scavenger (6-hydroxy-2,5,7,8-tetramethylchromane 2-carboxylic acid, 323 mg in 8.2 ml of dioxane). The reaction is as follows:

| | | |
|---|---|---|
| Time | Speed | Action |

| | | | |
|---|---|---|---|
| 3 | min | | Water bath 99.9° C. |
| 30 | min | 1000 rpm | Thermomixer 60° C. |
| 3 | min | | Water bath 99.9° C. |
| 1.5 | hour | 1000 rpm | Thermomixer 60° C. |
| 3 | min | | Water bath 99.9° C. |
| 3 | hour | 1000 rpm | Thermomixer 60° C. |

[0193] Subsequently purifying the reaction mixture by ultrafiltration using a Millipore Microcon™ column The purification is conducted according to the manufacturer's instructions. More specifically for desulfonation and washing:

| Time | Volume | Speed | Action |
|---|---|---|---|
| | 200 μl | | Sterile water to bisulfite |
| | | | reaction; mix, vortex & spin |
| | 400 μl | | Bisulfite mix to Microcon column |
| 20 min | | 14,000 g | Discard tube with flow through; |
| | | | replace with new tube |
| | 400 μl | | Remaining bisulfite mix to the |
| | | | same Microcon filter |
| 20 min | | 14,000 g | Discard tube with flow through; |
| | | | replace with new tube |
| | 400 μl | | 0.2 M NaOH |
| 12 min | | 14,000 g | Discard tube with flow through; |
| | | | replace with new tube |
| | 400 μl | | 0.1 M NaOH |
| 12 min | | 14,000 g | Discard tube with flow through; |
| | | | replace with new tube |
| | 400 μl | | ddH₂O |
| 12 min | | 14,000 g | Discard tube with flow through; |
| | | | replace with new tube |
| | 400 μl | | ddH₂O |
| 12 min | | 14,000 g | Discard tube with flow through; |
| | | | replace with new tube |

[0194] Then adding 50 μl of Bisulfite TE buffer (pre-warmed to 50° C.; 0.1 mM EDTA in 10 mM Tris) to the membrane and incubating for 10 min under agitation (1000 rpm). Inverting the column into a 1.7 ml low-retention tube and spun at 1000 g for 7 minutes to elute the DNA. Finally, determining the DNA concentration by a control gene (HB14) real-time PCR assay.

[0195] Amplification

[0196] See FIGS. 1A and 1B for amplicons and PCR oligonucleotides Amplicons with “rc” in their names were amplified from the second bisulfite treated strand, others from the first bisulfite strand.

[0197] Bisulfite treated Septin 9 region HM assay with conserved complexity using Cp[AT] methylation to conserve 9 cytosines according to the present invention (“C” are indicative of conserved cytosines):

| Segment of Sepin9 region (SEQ ID NO: 1): | |
|---|---|
| ttcgCtgttCatCagtCatCatgtcggatttcgcggtCaacgcgCagCtggatgggatCatttcgg | SEQ ID NO: 135 |
| Primers: | |
| gCtgttCatCagtCatCatgt | SEQ ID NO: 130 |
| aaatGatcccatccaGctG | SEQ ID NO: 131 |
| Blockers: | |
| gtCatCatgttggattttgtggtCaatgtgCag | SEQ ID NO: 132 |
| Probe: | |
| cgttGaccgcgaaatccg | SEQ ID NO.: 133 |

[0198] For comparison reasons, conventional HeavyMethyl assay is as follows (FIG. 1A):

[0199] Bisulfite treated Septin9 region of interest HM assay:

| Segment of Septin9 region (SEQ ID NO:1): | |
|---|---|
| ttcgttgtttattagttattatgtcggatttcgcggttaacgcgtagttggatgggattatttcgg | SEQ ID NO: 134 |
| Primers: | |
| gttgtttattagttattatgt | SEQ ID NO: 126 |
| aaataatcccatccaacta | SEQ ID NO: 127 |
| Blockers: | |
| gttattatgttggattttgtggttaatgtgtag | SEQ ID NO: 128 |
| Probe: | |
| cgttaaccgcgaaatccg | SEQ ID NO.: 129 |

[0200] Amplifying Fragments of using the following conditions in 25 ul reactions:

[0201] PCR Reaction:

| | 1x volume(ul) | Final conc. |
|---|---|---|
| 10X DyNAzyme EXT buffer w/MgCl₂ | 2.5 | 1X |
| 2 mM dNTPs | 2.5 | 200 uM each |
| Rev/For primer combo (10 uM stock) | 1.25 | 0.5 uM each |
| DyNAzyme EXT polymerase 1 U/ul | 0.5 | 0.5 unit total |
| Bisulfite Treated DNA (@10 ng/ul) | 2.5-5 | 25-50 ng total |
| DMSO 100% | 0-0.5 | 0-2% |

[0202] Cycling Conditions:

[0203] 3 min 94° C.; 20 s 94° C.; 30 s 54° C.; 45 s 72° C. (38-42 cycles 10 min 72° C.

[0204] Purification of the PCR Product

[0205] Purifying PCR product with the Montage™ DNA Gel Extraction Kit according the manufacturer's instruction.

[0206] TA Cloning

[0207] Cloning and propageting the PCR product with the Invitrogen TOPO® TA Cloning kit according to manufacturer's instruction.

[0208] Sequencing

[0209] Culturing Individual colonies in LB (50 ug Carbenicillin/ml LB for selection) by using 1 ul of overnight culture for colony PCR in a 20 ul volume:

[0210] PCR Mix

[0211] 2.5 ul 10× DyNAzyme buffer

[0212] 2.5 ul 2 mM dNTPs

[0213] 1.25 ul M13 F primer (10 uM)

[0214] 1.25 ul M13R primer (10 uM)

[0215] 0.25 ul DyNAzyme Polymerase

[0216] 12.25 ul ddH2O

[0217] Cycling Conditions:

[0218] 3 min 94° C.; 1 min 94° C.; 1 min 55° C.; 1 min 72° C. (36 cycles); 10 min 72° C.

[0219] Colony PCR amplicon purification and sequencing reads are done using standard protocols. Sequencing primers are one of the amplicon specific primers that generated the initial PCR product.

### Other Embodiments

[0220] The detailed description set-forth above is provided to aid those skilled in the art in practicing the present invention. However, the invention described and claimed herein is not to be limited in scope by the specific embodiments herein disclosed because these embodiments are intended as illustration of several aspects of the invention. Any equivalent embodiments are intended to be within the scope of this invention. Indeed, various modifications of the invention in addition to those shown and described herein will become apparent to those skilled in the art from the foregoing description which do not depart from the spirit or scope of the present inventive discovery. Such modifications are also intended to fall within the scope of the appended claims.

### REFERENCES CITED

[0221] All publications, patents, patent applications and other references cited in this application are incorporated herein by reference in their entirety for all purposes to the same extent as if each individual publication, patent, patent application or other reference was specifically and individually indicated to be incorporated by reference in its entirety for all purposes. Citation of a reference herein shall not be construed as an admission that such is prior art to the present invention.

TABLE 1
Genomic sequences according to sequence listing

| | | | | | | | Unmethylated | | Unmethylated |
|---|---|---|---|---|---|---|---|---|---|
| | | | | | | Unmethylated | CpG | Unmethylated | CpG |
| | | | | | | CpG | Chemically | CpG | Chemically |
| | | Un- | Unmethylated | | Unmethylated | Chemically | or enzymatic | Chemically | or enzymatic |
| | | methylated | CpG | Unmethylated | CpG | or enzymatic | treated of | or enzymatic | treated of |
| | | CpG | Artificially | CpG | Artificially | treated of | Artificially | treated of | Artificially |
| | | Artificially | methylated | Artificially | methylated | Artificially | methylated | Artificially | methylated |
| | | methylated | forward | methylated | reverse | methylated | forward | methylated | reverse |
| SEQ | Associated | forward | strand at | reverse | strand at | forward | strand at | reverse | strand at |
| ID | Gene | strand at | ggcC, agCt, | strand at | ggcC, agCt, | strand at | ggcC, agCt, | strand at | ggcC, agCt, |
| NO. | Name | Cp[AT] | Ccgg | Cp[AT] | Ccgg | Cp[AT] | Ccgg | Cp[AT] | Ccgg |
| 1 | Septin9 | 8 | 15 | 22 | 29 | 36 | 43 | 50 | 57 |
| 2 | Q9HC74 | 9 | 16 | 23 | 30 | 37 | 44 | 51 | 58 |
| 3 | GSTPi | 10 | 17 | 24 | 31 | 38 | 45 | 52 | 59 |
| 4 | PITX2 | 11 | 18 | 25 | 32 | 39 | 46 | 53 | 60 |
| 5 | PITX2 | 12 | 19 | 26 | 33 | 40 | 47 | 54 | 61 |
| 6 | RASSF2A | 13 | 20 | 27 | 34 | 41 | 48 | 55 | 62 |
| 7 | SHOX2 | 14 | 21 | 28 | 35 | 42 | 49 | 56 | 63 |
| | | | | | | | methylated | | methylated |
| | | | | | | methylated | CpG | methylated | CpG |
| | | | | | | CpG | Chemically | CpG | Chemically |
| | | | methylated | | methylated | Chemically | or enzymatic | Chemically | or enzymatic |
| | | methylated | CpG | methylated | CpG | or enzymatic | treated of | or enzymatic | treated of |
| | | CpG | Artificially | CpG | Artificially | treated of | Artificially | treated of | Artificially |
| | | Artificially | methylated | Artificially | methylated | Artificially | methylated | Artificially | methylated |
| | | methylated | forward | methylated | reverse | methylated | forward | methylated | reverse |
| SEQ | Associated | forward | strand at | reverse | strand at | forward | strand at | reverse | strand at |
| ID | Gene | strand at | ggcC, agCt, | strand at | ggcC, agCt, | strand at | ggcC, agCt, | strand at | ggcC, agCt, |
| NO. | Name | Cp[AT] | Ccgg | Cp[AT] | Ccgg | Cp[AT] | Ccgg | Cp[AT] | Ccgg |
| 1 | Septin9 | 64 | 71 | 78 | 85 | 92 | 99 | 106 | 113 |
| 2 | Q9HC74 | 65 | 72 | 79 | 86 | 93 | 100 | 107 | 114 |
| 3 | GSTPi | 66 | 73 | 80 | 87 | 94 | 101 | 108 | 115 |
| 4 | PITX2 | 67 | 74 | 81 | 88 | 95 | 102 | 109 | 116 |
| 5 | PITX2 | 68 | 75 | 82 | 89 | 96 | 103 | 110 | 117 |
| 6 | RASSF2A | 68 | 76 | 83 | 90 | 97 | 104 | 111 | 118 |
| 7 | SHOX2 | 70 | 77 | 84 | 91 | 98 | 105 | 112 | 119 |

| | | |
|---|---|---|
| Enzymes that add methyl group | SEQ ID NO. forward strand | SEQ ID NO. reverse strand |

Table 1A: sequence recognition cites of enzymes that add methyl group outside of CpG dinucleotide sequence

| | | |
|---|---|---|
| Alu Methyltransferease | 120 | 121 |
| HaeII Methyltransferase | 122 | 123 |
| MspI Methyltransferase | 124 | 125 |

Table 1B: Genomic sequences of oligonucleotides used in a HeavyMethyl assay according to sequence listing

| | |
|---|---|
| Artificial primer 1 for Septin9 HM assay unconserved | 126 |
| Artificial primer 2 for Septin9 HM assay unconserved | 127 |
| Artificial blocker for Septin9 HM assay unconserved | 128 |
| Artificial probe for Septin9 HM assay unconserved | 129 |
| Artificial primer 1 for Septin9 HM assay conserved | 130 |
| Artificial primer 2 for Septin9 HM assay conserved | 131 |
| Artificial blocker for Septin9 HM assay conserved | 132 |
| Artificial probe for Septin9 HM assay conserved | 133 |
| bisulfited treated segment of Septin 9 sequence for HM assay | 134 |
| Preserved and bisulfite treated segment of Sepin9 for HM assay | 135 |

* C is modified (methylated) in the sequence.

TABLE 2
Number of cytosines preserved in each bisulfite strand of the gene sequences

| | Sepin9 | Q9HC74 | GSTPi | PITX2 | PITX2 | RASSF2A | SHOX2 |
|---|---|---|---|---|---|---|---|
| Genomic | 1229 | 1623 | 2387 | 704 | 506 | 772 | 1507 |
| Genomic Reverse | 1298 | 1389 | 2089 | 579 | 510 | 861 | 1208 |
| Bisulfite treatment after | 614 | 901 | 1284 | 281 | 167 | 309 | 800 |
| Cp[AT] methylation | | | | | | | |
| Bisulfite treatment of | 655 | 805 | 1142 | 227 | 149 | 329 | 652 |
| reverse after Cp[AT] | | | | | | | |
| methylation | | | | | | | |
| Bisulfite treatment of | 79 | 79 | 148 | 52 | 47 | 60 | 89 |
| after GgcC, aGCt, | | | | | | | |
| CcgG Methylation | | | | | | | |
| Bisulfite treatment of | 81 | 80 | 145 | 51 | 48 | 61 | 88 |
| reverse after GgcC, | | | | | | | |
| aGCt, CcgG | | | | | | | |
| Methylation | | | | | | | |

The application's sequence listing, which the Patent Office published only in electronic form, follows.

SEQUENCE LISTING (135 sequences)

SEQ ID NO: 1 - DNA, 1405 bp, Homo sapiens
cgttacccgagttgtaaagggcggctccctgtgtctgccccgctgcaccgatacaccgagctgcgcacggtgcccagcgcagggagaacaaatgatcatctgtccaacgcgcccatttacaggtgaggaaactaaggctccaactcaatcgacgcactctgcccttttgattaccagaaaagtagcaggacaggtgtcctgtcccgccctaccccggcccactaagccggcaccccggctccgacccccggctgtgcccggcgccgccgcggtgcccggcgccgccgcctcgcccggcggggccgcccggagcgcccgcacctccgcccgcttccacctggccgggcccgccccgcccggactcgggactgggaagtgcggcgactcccggaaccagccattggcgccagcgcggggagctgggggtgcagagctgcgggcgcggcgggccacgcaggcggcccccacccccggcctggcctggtctggtctggtctgcgctgccgcgcgggggcgccccctcccaggcccggcgcccgccagccccgctccgccaggtgcagcgcagcgcaggggtgggcgggggtggggctcggcgcgcacgttcacggggcggggagggggcgggtcaggggcgggaccacagccggctgggccggggttctatgcgcatctccggggaggggcggggcgggggcggggccggggcggggcccggtcggtgcactccagacggcgggccgccccctcttcccgccttcctactaccggcccaggattagcgccctgggagcgcgcgccccgctgcctcgccgccacactttcctgggagcggcggccacggaggcaccatgaagaagtcttactcaggtgggcttcgcgcccggggtggggaggggtcggtgtcccgggaccagcgctgctcacctgagtgcctgcggccgggagtggcgaggcgcccccggagctgagcgagtccccgcggcgggcacactgcaggtcgagttcctcccaggacagggccgctgtcgggccgctttcgacctgagccgaccgtcccctgcgctgtctccagcccttgctcgagtgtcggaggggctgccctgggggacgctccctcttcctcgccccttgcaccctcgcaggaatcgctgactttccaggtcggccgggtgctttgggtccctgtgcgtctgtgtgggtgaatggggtcggggctaggtggaggggtgtccttgggttcagcctctagggctggtggtccaggccgcagcatcctttcttcggattctcttcggtttctcctctacttagtggggcacgggacggcctccagatgggaccgtccagcagcgcccaaacttggcgactcgggttcacgttttgcgctcaggacgccgcccgc

SEQ ID NO: 2 - DNA, 2365 bp, Homo sapiens
gtggtcgtggtgggggtgttagctgcaggggtgccctcggtgggtgggagttggtggcctctcgctggtgccatgggactcgcatgttcgccctgcgcccctcggctcttgagcccacaggccgggatcctgcctgccagccgcgtgcgctgccgtttaacccttgcaggcgcagagcgcgcggcggcggtgacagagaactttgtttggctgcccaaatacagcctcctgcagaaggaccctgcgcccggggaaggggaggaatctcttcccctctgggcgcccgccctcctcgccatggcccggcctccacatccgcccacatctggccgcagcggggcgcccggggggaggggctgaggccgcgtctctcgccgtcccctgggcgcgggccaggcggggaggaggggggcgctccggtcgtgtgcccaggactgtcccccagcggccactcgggccccagccccccaggcctggccttgacaggcgggcggagcagccagtgcgagacagggaggccggtgcgggtgcgggaacctgatccgcccgggaggcgggggcggggcgggggcgcagcgcgcggggaggggccggcgcccgccttcctcccccattcattcagctgagccagggggcctaggggctcctccggcggctagctctgcactgcaggagcgcgggcgcggcgccccagccagcgcgcagggcccgggccccgccgggggcgcttcctcgccgctgccctccgcgcgacccgctgcccaccagccatcatgtcggaccccgcggtcaacgcgcagctggatgggatcatttcggacttcgaaggtgggtgctgggctggctgctgcggccgcggacgtgctggagaggaccctgcgggtgggcctggcgcgggacgggggtgcgctgaggggagacgggagtgcgctgaggggagacgggacccctaatccaggcgccctcccgctgagagcgccgcgcgcccccggccccgtgcccgcgccgcctacgtgggggaccctgttaggggcacccgcgtagaccctgcgcgccctcacaggaccctgtgctcgttctgcgcactgccgcctgggtttccttccttttattgttgtttgtgtttgccaagcgacagcgacctcctcgagggctcgcgaggctgcctcggaactctccaggacgcacagtttcactctgggaaatccatcggtcccctccctttggctctccccggcggctctcgggccccgcttggacccggcaacgggatagggaggtcgttcctcacctccgactgagtggacagccgcgtcctgctcgggtggacagccctcccctcccccacgccagtttcggggccgccaagttgtgcagcccgtgggccgggagcaccgaacggacacagcccaggtcgtggcagggtctagagtgggatgtcccatggcccccatccaggcctggggatatcctcatccgcctcccagaatcgggccgtgggggacagaaggggcctgcgtgcgggcagggagagtattttggctctctcctgtcttcggggtttacaaagtgtgttgggacttgcggggctgctctgtccaagcctgggtctggcgtccgcgtctctgagcctgtgagtgcgtgcgctttcctgcgtcctcttgactgccggtgctggggctctgcgtcctgcgtccgcgggagtaaatacagcaggcgaaggggaagctcacacaatggtctccagcgctctggggcagggcttctgaggggcgggcctgcctctgccgggacctggagcccccgcccctcggagaggctcctaggctgacttgggcagagccctctggtgggccgggagggggaaaggctgtgttgaaatgagcaaactgtccaggtgtcaggccaagctgggaggtgaccagcctgaggtcctccccgctccatggccagaaccagggctgacatctgggtgtcctgagcccagctgcccacacggcccacctggggtcagccctatctgagtgggggaggcggggcctcctgggggaccagaactttggctggacgccaagcagagtgccagtggctgttcttcagggctgggcctgaggagggtgtggggcggcgaagggacgggagggggttgtgatccagtggccactggcgctgtgcagagtgtgagctggaaacatcgtagttactttgtcagcttagtggtgaaagccctttttcaggctctatccctttgcatccctgcttcccagagggaggggaggtctgggtctgcagagctgggagggcttgctgttcccgcccccctcccccacaacacctcctcatctggacatctttgggcacatgc

SEQ ID NO: 3 - DNA, 4261 bp, Homo sapiens
aacaagagatcaatatctagaataaatggagatctgcaaatcaacagaaagtaggcagcaaagccaaagaaaatagcctaaggcacagccactaaaaggaacgtgatcatgtcctttgcagggacatgggtggagctggaagccgttagcctcagcaaactcacacaggaacagaaaaccagcgagaccgcatggtctcacttataagtgggagctgaacaatgagaacacatggtcacatggcggcgatcaacacacactggtgcctgttgagcggggtgctggggagggagagtaccaggaagaatagctaagggatactgggcttaatacctgggtgatgggatgatctgtacagcaaaccatcatggcgcacacacctatgtaacaaacctgcacatcctgcacatgtaccccagaacttcaaataaaagttggacggccaggcgtggtggctcacgcctgtaatcccagcactttgggaagccgaggcgtgcagatcacctaaggtcaggagttcgagaccagcccggccaacatggtgaaaccccgtctctactaaaaatacaaaaatcagccagatgtggcacgcacctataattccacctactcgggaggctgaagcagaattgcttgaacccgagaggcggaggttgcagtgagccgccgagatcgcgccactgcactccagcctgggccacagcgtgagactacgtcataaaataaaataaaataacacaaaataaaataaaataaaataaaataaaataaaataataaaataaaataaaataaaataaaataaaataaaataaagcaatttcctttcctctaagcggcctccacccctctcccctgccctgtgaagcgggtgtgcaagctccgggatcgcagcggtcttagggaatttccccccgcgatgtcccggcgcgccagttcgctgcgcacacttcgctgcggtcctcttcctgctgtctgtttactccctaggccccgctggggacctgggaaagagggaaaggcttccccggccagctgcgcggcgactccggggactccagggcgcccctctgcggccgacgcccggggtgcagcggccgccggggctggggccggcgggagtccgcgggaccctccagaagagcggccggcgccgtgactcagcactggggcggagcggggcgggaccacccttataaggctcggaggccgcgaggccttcgctggagtttcgccgccgcagtcttcgccaccagtgagtacgcgcggcccgctccccggggatggggctcagagctcccagcatggggccaacccgcagcatcaggcccgggctcccggcagggctcctcgcccacctcgagacccgggacgggggcctaggggacccaggacgtccccagtgccgttagcggctttcagggggcccggagcgcctcggggagggatgggaccccgggggcggggagggggggcaggctgcgctcaccgcgccttggcatcctcccccgggctccagcaaacttttctttgttcgctgcagtgccgccctacaccgtggtctatttcccagttcgaggtaggagcatgtgtctggcagggaagggaggcaggggctggggctgcagcccacagcccctcgcccacccggagagatccgaacccccttatccctccgtcgtgtggcttttaccccgggcctccttcctgttccccgcctctcccgccatgcctgctccccgccccagtgttgtgtgaaatcttcggaggaacctgtttacctgttccctccctgcactcctgacccctccccgggttgctgcgaggcggagtcggcccggtccccacatctcgtacttctccctccccgcaggccgctgcgcggccctgcgcatgctgctggcagatcagggccagagctggaaggaggaggtggtgaccgtggagacgtggcaggagggctcactcaaagcctcctgcgtaagtgaccatgcccgggcaaggggagggggtgctgggccttagggggctgtgactaggatcgggggacgcccaagctcagtgcccctccctgagccatgcctcccccaacagctatacgggcagctccccaagttccaggacggagacctcaccctgtaccagtccaataccatcctgcgtcacctgggccgcacccttggtgagtcttgaacctccaagtccagggcaggcatgggcaagcctctgcccccggagcccttttgtttaaatcagctgccccgcagccctctggagtggaggaaactgagacccactgaggttacgtagtttgcccaaggtcaagcctgggtgcctgcaatccttgccctgtgccaggctgcctcccaggtgtcaggtgagctctgagcacctgctgtgtggcagtctctcatccttccacgcacatcctcttcccctcctcccaggctggggctcacagacagccccctggttggcccatccccagtgactgtgtgttgatcaggcgcccagtcacgcggcctgctcccctccacccaaccccagggctctatgggaaggaccagcaggaggcagccctggtggacatggtgaatgacggcgtggaggacctccgctgcaaatacatctccctcatctacaccaactatgtgagcatctgcaccagggttgggcactgggggctgaacaaagaaaggggcttcttgtgccctcaccccccttacccctcaggtggcttgggctgaccccttcttgggtcagggtgcaggggctgggtcagctctgggccaggggcccaggggcctgggacaagacacaacctgcacccttattgcctgggacatcaaccagccaagtaacgggtcatgggggcgagtgcaaggacagagacctccagcaactggtggtttctgatctcctggggtggcgagggcttcctggagtagccagaggtggaggaggatttgtcgccagtttctggatggaggtgctggcacttttagctgaggaaaatatgcagacacagagcacatttggggacctgggaccagttcagcagaggcagcgtgtgtgcgcgtgcgtgtgcgtgtgtgtgcgtgtgtgtgtgtacgcttgcatttgtgtcgggtgggtaaggagatagagatgggcgggcagtaggcccaggtcccgaaggccttgaacccactggtttggagtctcctaagggcaatgggggccattgagaagtctgaacagggctgtgtctgaatgtgaggtctagaaggatcctccagagaagccagctctaaagcttttgcaatcatctggtgagagaacccagcaaggatggacaggcagaatggaatagagatgagttggcagctgaagtggacaggatttggtactagcctggttgtggggagcaagcagaggagaatctgggactctggtgtctggcctggggcagacgggggtgtctcaggggctgggagggatgagagtaggatgatacatggtggtgtctggcaggaggcgggcaaggatgactatgtgaaggcactgcccgggcaactgaagccttttgagaccctgctgtcccagaaccagggaggcaagaccttcattgtgggagaccaggtgagcatctggccccatgctgttccttcctcgccaccctctgcttccagatggacacaggtgtgagccatttgtttagcaaagcagagcagacctaggggatgggcttaggccctctgcccccaattcctccagcctgctcccgctggctgagtccctagcccccctgccctgcagatctccttcgctgactacaacctgctggacttgctgctgatccatgaggtcctagcccctggctgcctggatgcgttccccctgctctcagcatatgtggggcgcctcagtgcccggcccaagctcaaggccttcctggcctcccctgagtacgtgaacctccccatcaatggcaacgggaaacagtgagggttggggggactctgagcgggaggcagagtttgccttcctttctccaggaccaataaaatttctaagagagctactatgagcactgtgtttcctgggacggggcttaggggttctcagcctcgaggtcggtgggagggcagagcagaggactagaaaacagctcctccagcacagtcagtggcttcctggagccctcagcctggctgtgtttactgaacctcacaaactagaagaggaagaaaaaaaaagagagagagaaacaaagagaaata

SEQ ID NO: 4 - DNA, 6343 bp, Homo sapiens
gattgcctatcctcgccaccagctgaaggcaaggccgttctgctacgagcgcctcttaatctctacaaaatgaaaagaaaaaaagggaggattattagcccattactcagaggaatggggaggctgcaaaaatcgtcgatgggcagaggtgaagatgtctttctcggactgcactttccggtgtcctgtaactagagttcagttgtgggacttgttgaagaaatttgattttcttgcctcggcgagatttcaaaaaccagaaatagaaattctcagagtcagagaggaaatacaattaaacagcacgtgggcattttccccctcatttctctccccttaaataacactgctttgagtttccactgggtaaagagagaaagtttgagttttcacggatgttacgtggaggttagaaatggcttaaaatgtagatctctaatcagttttcttcgtggctgaagaggctaaccctttccataaaatgagtccatctgtcgactgttagctatttcaaagtgaagggatttagcactcaaaacaaattgagcaagtttgtttgcctgtttttactgctaactcaaatgaattcaaaacacggagtaattcaagaaaacacataacatgttccagacagcccccaaaagtagggaaagcccagcacctatatagtgactagggttagttttaagcgccaagcttttttaaacgtatctattttatgcacattctcccgagtcactatatatttctaaaattgcgagtattggtatattgatttaggaagagcaatacaacttttagagggaactttattctcaattagggaccaaagagatgtctttttaatagcgggcctgagttttgctctcaagcaggaattaatattggtgggaaaatccgaatccaggagcaatggctgtgttccggcactttccaaaaacatacattaacaggatgcccttgagattgaaaaaacattgtcccatatgcctggcagaagccttcacacctggtcctccaggcgaattatatttatagtccttccactcagaggcaggacagagccaaaatattctgctcactaccaaaatacacatctttgctcaagtcaagaaatcagaaaatcagggttcagaagtaaggcacacttttcgagtgagaatatgccctgtaatttcacatactctttgctttgcaggagcaaatgtggacttgagggaaactctctcccccacccccacttctatcccgtgcaatttaataccatcctcgccaggaaccttaacctcgtcattttaaaaaatgagatatccgtgacccagggtgaacttgttgaatgtaggtacagcagaggaaattctagactctatgagcgtctgagccttgtccagtgcaaacccttcgtgaacactgggtcagtgcgtggccgtgcccacctgtgcgccgacactctcagcatgcctggtccacccgccttgacctcgggcgcggtgtcccagctaagctgggcccagcgtcccggccttccccagctgacaagcctagctcgttcgctcccggctgtggccctcccaccctctcccactagctcactccattcttctagatttctcttcactcatcctctcccatccccaccgcgcccacctccactcccgccctctaccggtctctcactttcctccctccgcagtccctctttgctgtgacctctttcctcaactctgcaggcctgaaagaaggtcacacacgcacgctcacacccacactccacacgcctcgtcccaaacaaccccatgaacattgtcctttgttccgtctcttgggccactttccctgtcgcttcctcccagcccgtcctgatttgctccccaaaagtacgtttctgtctccccgctgccctggcgctccccctttgatttattagggctgccgggttggcgcagattgctttttcttctcttccatcccatcctcccttctggtcctcctttccacagtgggagtccgtgctcctgctcctcggttggctcctaagtgccccgccaggtcccctctcctttcgctctcccggctccggctcccgactcttcggcccgctggcatctgcttccctcccctgcctcgtttctcgtcgcccctgctcgctccccccggcgctcgcccgggcgctgtgctcgctcctggatcgccagccgcgcagcgggctcgccggcgcccgcgcgccactgtgcagtggagtttggtggaatctctgctgacgtcacgtcactccccacacggagtaggagcagagggaagagagagggatgagagggagggagaggagagagagtgcgagaccgagcgagaaagctggagaggagcagaaagaaactgccagtggcggctagatttcggaggccccagtgcacccgtggactccttcggaacttggcaccctcaggagccctgcagtcctctcaggcccggctttcgggcgcttgccgtgcagccggaggctcggctcgctggaaatcgccccgggaagcagtgggacgcggagacagcagctctctcccggtagccggtaagtggaggccatctatcccgcagggatgtgagataatgcgagtctggaaatttgttccacttcggagaatcttcaccgtaggtgatttgtggcttttggggctaagtttcgcccaaggtaacgcagtcggcaaacagaccttgcaaagccctgttcctttcgtcccccgccacagacactaacaatctacagggtgctgaagtcgagagggaagccagaccgtggctggcatttaaaacgaggtatcttcccttaaatctcggtgccaacactgcaggaacaaatcctcgggccaaggattagcattctcaagataaagggctgggtacaaagtttcagctactggaagattagcccccttcccattgttatccattgggaaaaaaaagaaaagaaaaagattccatcttaactggcagttagtgacctctcaggcccaagcgaattacctgggagccaggcctggatgccaagctctcaccatttctttggattgtaactcctttaaattgatcaccagtcaactccaatctggcacttcaggagatacactttaaatggatgcagagaattattttccagctggagattaagaaaaaaattttcgattctaaacctccgaaatatgttcctcttttccagtttaaccactttactttcttaagcaatttagaaatcaaactatcataaggtggtgtgatttttttttactcttttgtgtgagtattgtcttactaaactaaacggaaaaaacttttaccattataaatgtaaatatcagaattcatacattctaaaatatttttatgaaaaattaatctgatttaaagaaatttccttgcatttgttttagtctatcaatcaaaactaaagatgcttttatcacacaaaatatcattttggcagaaatccatctaaaattcaaataccaataatatcaagaaaacaaagcacataagcaaaataaattgaagatttttgttgatgtaacatgagcatacaacatttcaataaccaaactttccctaaaaaattaaatagccacttcatttgtggaatgttttactttaactcagcaaaattacacttaaattatttaggtgctttgttccttaagttaagcgtgtttgtcttcaaatgttcctaaagcacttatattaattggttgtaaagaacgcatacacatggtaaaatacagaactgaactgagcagtattttaatttccttaaataattacttactacaaattaatttactggctaatttcacaatttagttcatttaaaacacatgttcctgtgctgtttatttttaaactttccattaaagattttgttatggggtaacaaagtgtatgaaaaggggggaaatgtgaaaggatctgggattattcgaactgtatttttcctgcactttcagtcttgcggtagtcatcagaaattattttttagcaaattgttttatttcttagggcttgcctgcctgctttgccatggttcctcgtcctccgttagccgtgtagtgctttttgtgtgctcacaatataaaacccaagttggccaaaacaagagtccttggcatatacattccaactagaacatgaactttgggggtgagaactacctcccatcaggaaaagtctcccatctcaatttgtgagattagccattgaagccagttccgaagtctggcagccaaatttctcacagaagacttgtcttgatagggcaagtttaaggatcagcaggcgggaattggaggtctctttttaaaaaattatcttccccagttatttagactcagttcttctagtaggcctggtcattaaatgaagcataaaaatgcaagtctcaaggctcattttgactgcaaaataaatctccaagtcacaaggacatgtaggagtgagctaaggaacacgccttgaccttcttttcagtccttagagtggagctctatgagttcttgaagatttgttttgtattgctttgtttggtcttcagcactgaagcacggggaagtggggggaagaatgtgtaataattgactgactttacaccaagcaacgcaatctttttcttttgtatatttcattctttaaaaaaaataaataaataaaaactatttgcagttaccatctgcagtgctccggctaccagctaataatgcagccagttcagacatataaaaaaaaaagattatcgaaatgatgatgacatgcaaatttcctccgaaattatcataagtaaacatttgaagtctggactaataaaatcccatctgtgttacttcatatcgagttagtagaaagctgtgataatgaattttgtaatatctcacgaacagacatctcaatcagggactaatcctgtgattttactgcagaatcactaaatctggagccgccaaactgctacttctgggcccacgggcccacaaggatcgaatcggcagagtccccgcccgcgttctcgctagcgggtgggggaaccgcctggccgtccccaccctggatccccacgccacagcgccgggcagcccctcctgtaggcagcgaccttggccagaggctccccagggcccagctcccttcaggagaggccgagacgcagggaaacggtactcaggccagaggcaggcccgcagctccctgccccgcctctgtgcctccgccaacccgacaacgcttgctcccaccccgatccccgcacccgcgcgaagtgggccctccggtcgtcggcgtaccctggttagcgtggagagaggcaggcgctgagatcgaaggggcctagggagccctggaccttcttttcttgtctttaaagcaaccgcggctcttctacccacccggtggagcccctcgagacccacctctcccggcttgcctgtggcagagaagggggagcgcgttaaatgcttggctcgctgcgttgtggttgaaaacgtgaaaaagatttggctcgcccgggagagaaagggggagaactgggtagcagttataccagagctatttctccgtccttggcgggcagtaaaccctccaagaacgtttgccctgctctcctcagtctcgctcagtccacccagtgtctctcctctgcgatcttaaatcatactttagggtaattatttgtagtaagtaaataaatggccgggttagtatctctaggagaaagtgtggctaaatatggaaaagtggctcctgatggatgagaggcccgaactcagctcgctcctgaaacaccctaggccaagagcccgttcgtttcagaattacagaaaaccgagggaaactgctgtctaggacaggggcacgttggcgctgatgttctacaaatgtttaccgagctccaactaatggacaagcactgaagggtggtctttgcatacagcttcccaaagagaaaagtcctctccacccacccactcccgctgccattgcgttcagatgagttcttaaccccggcaccgagattcttgaaagtaggtccacagcctccccagcacactgtggctttatagtcctctaacctctgggcacttttgcggcaactctggagggagatcccctcttgataaataaatgtcctgggcccgaggctaggctggagatgctgctgcacatgccagaggctgtcaggtcggaaaaacacgcctgaagcctagcacacagtaggcgcctaacagctagtgtaacgtagtctcatctgagccctgctcactcgacggccgccgcttcttacagccttccttctcttctgttttgcaga

SEQ ID NO: 5 - DNA, 9001 bp, Homo sapiens
agctgatggacttgctaaatttctttcttcttttttctttttcatattatttgctagccataatggaatcctctaggtttaagccaaagaaaaattggagagacaaaattagattttgtagcccttttcccccccgggaatgcctttttttttctttttagtttctgatgaatggctatcatttatttctaccaaatttaaataaggactgctgccttgtatgtttaactaggcaggcagagggaactggtttgtttaggaagcagtgactgagatgtcctggccaagttagtgacagaggaggggagaaagaatccagaccaatttgtatgcagtatattttactcccatgaaataaaacacatttgtttcatatttgctgaaaagtaaaacaataatattgtacgaaatgttatacacagggtaggttgtacatagcagtttcagaaacatcattgcatccaccagagaaactattctaaaactgatattcacacattttttataataataataatatgttagaaacatacagtgtggcatttagtatatacactcccttgctcgcaagcgaaaaatcctaatcgcttctgtataacatgctttattttaaagcctaacctttaaaaacactgttgtgatattactaacaactgcttttataaaattaatttgacatttcgatatatatacatcctttcagtcatttaaatgttaacaatgctaaacttaaaaaataacaagcttatagtaatgttaaaatgtcatatccagtcaaacatttgtttgtgtatgtgtccttgcaactgttagaaatacttgtagtgaaagatgtcagacactgaggacatccctttgaaatcaaaggagctctctctttgattcagtggtttccttttctctatatagcttctctttctctccctttctttagtgcccacgaccttctagcataattcccagtctttcaagggcggagttgccccatccggcaaggtcctaggatcccggcgctgtgggtgcggctcacacgggccggtccactgcatactggcaagcactcaggttggaggccgggttctgcacgctggcgtagccgaagctggagtgctgctttgctttcagtctcaggctggccaggctcgagttacacgtgtccctataaacatacggaggagtcggcggcgcgtaaggacaggcaggcgtcggcaccgcggaattcagcgacgggctactcaggttgttcaagttattcaggctgttgagactggagcccgggacgcctgtcactgctgagggcaccatgctggacgacatgctcatggacgagatagagttgggtggggaaaacatgctctgtgatgacagggggttgacgttcatagagttgaagaaggggaagctcttggtggatagggaggcggatgtaaggcccttggcggcccagttgttgtaggaatagcctgggtacatgtcgtcgtagggctgcatgagcccattgaactgcggcccgaagccattcttgcatagctcggcctgctggttgcgctccctctttctccatttggcccgacgattcttgaaccaaacctgggggcggttggggcaagggagcaaacagatgccacagtgcagattactaaaacttccatcggaggccaacccccgccttcccccgacacacacgctagcgcactcacacaccctggcctcgcttcactgcaccgccctgcacaccaagataccagggccagctttcagttactggcccgggtctccaccaagcgcaggagacctggtctgctctggcctgcgagctgggactcggagctacgccacaaacctcagccgaacgcatggagacctgcggacggtttgatcactcagccaggcgtttctccaggtccaaaaacacttaatgtaaaacaaacgcggggcagcaggcttttccaacccttcccggggcaccttgcaaacttgcttccattccaaagccacagacccacggatgaggagaaggggctggaagggcactagaggatcgctctttctcccacgcaattcctcccttccttccctgacctccactgtcgtcccccaccccctggtacgtgctcccttaacagggactaggccgccaacactctttctcgcctagcaaaacaaccaaataaagagcaaaagaccacctcttcgtcagctcgttaactccaggagcttggcatattaaactccgggaacccggaaagggtagttttggagattcccccttctttcgctctgcctcttctttaccctaagcccaccacaggcctgtccgcgcgccaggcccagccgggtcgtttggctttgcaggcggccacccaggccggccggcttccacccgtgtccggtggcccagccgcaaccccgatcccaatccacatcgggcctccctgtcgccccagacggcggcttttgtgtattggagagaggcctggcctgagatatccgagctgacaccagtgatgtttcacattacacatctccgccgggcccagccgtgtaatccgctttttctctttttcctttcattcttgatttcctttttatcccccttcctctttgcacccgactgctataaaaagcacgcctcactcccacttggctcgacaagcagccgccctggaaggagaggcagctgcaaggagagcccagcgccgcggctacaaagcactagggtggagctgcggaatagcgggcggggtgggagggcgttttcgaaggatcccagaaaacccatagactctgtctttaattacttgccatttctaccctaggccatctaaactttgctcaggcgagaagagtacgtgagaggcccgttcccttgatgtgcaagagagctaatgaaagactgaccttgctcaaaaccacgccgcccaggacccagctctggctctggacagttaaactaaaaccattttcaacttcttcccggccttttatccaccagcatagcctcatgccttgcacaaatgccacccagagagtgtcttcattccctctgatttgggagagcattttggtctttattctttttatcgttgttttcttctttttgtttgctctgctctaaccgggggctttattttttctacccagagcacttaattttttttttttaacagcaaagcctctggatgccgcttgatttgcttgattctgttttctgcttccagaatcctaacaaatttggaatcttccaccgaccagcataaaccaggacgttgctattgggttatttatttgagctcatttttgccaatccataaagtacagatttgctacaaagttaaggtaagccctttttacaaaactatgattataatttagaagagggggtgtgagtttcaatttccagagttcaactcctgagagaagataaataaaccaagcagaaaagtctttcttctttttttctttctccttctaagaggactagtagttgtgtattaaaactttgctcccggagatcacaaaactaggaaatagggtgtgtgggagagacctgaatggccgaaacaaccgtaaagaaggtgtaagaagcgcgagcccaggagggaaaaagctgggccagggccgggacaaaggtttcccagggagggccaactcttccgtgtctctggcgggttttccttgttaaaggctcacaggttggagcctgttcgcggctcttggcctggtagggattttattagctctgctctggcaactgcaagccaggaacacaatgtcctgtgcaggggattgcccatgcagcccagctcgtgagatcgcgggatggcggggcagtgagccggtgccgctctgggagcctgagccagggcggcagtcctgtcggcctcggagagggaactgtaatctcgcaaccaggccgccgcgaggccttctgcctttgcaaagctgcgccccaccggcgccctcccaggcggcgctgccttccacattctctcctggtctacttggcctgtacctccacaacatcctccccccatccctcccagactccgtgctggctcctacccggactcgggcttccgtaaggttggtccacacagcgatttcttcgcgtgtggacatgtccgggtagcggttcctctggaaagtggcctccagctcctggagctgctggctggtaaagtgagtccgctgccgcctttgccgcttcttcttagacgggtcctcggcgcccacgtcctcattcttcccctgctggcttttatctttctctgaaaacgaaacacacacactttcccgtcagcatgcccacctgcaacgcggacgccaactggaccggcggcagaagccgtggaagagctgggctgcctggcgccggaggagggtgcgcgcggcggctccgggccgcgaggagcgctgcgcctgtggggtgtgcaggcgcaagtgtgggtgtccgcgccccatttcctcccctcccccagcgccgcacgttttatttacatgtttatctcactgcagcggcacattcacttttatagcctgtgctttcaagtatatttatacacctctgcgcagacacaccaaatctcctgggacgcgcacacgcgcgtggtttacagacccccctccccctcgcagaaagctcagatttccatgcggtttgggaaggctaggaaaagatgtggggattcggttgggcaccgaagttcgccggccctttcccaaaaaaaaaaaaaaaatgcctcttcgcgaagggcatttctgagtggtttcaggcaatttcctaacgagtggagctcctcgggagctgaaagccgagaggaaaacagggacagaggtcggcggcctctgaaggtcctcgaatcaagatgctgggatttttgtgacccaggaaacagaagggaggccagggtacgaatagagagggcggcagaattgctcgcgcccttagcgccccaggagccgggccggtcgagggagaactaaagggatgcggggtagtcaaaattccggctcccggaagttctgcggggagccaggcgaacgaccactcccaccacgcctccccccggaggggctgacttccttggggcgagagggagcgggtggcgcagagcagctgagcgggaatgtctgcagggcggcgcggcgccttacctgcggcctccgggctggaggtgtcggagatggtgtgcacctccagcctgtgcttggaggagtccagcgaccggggctgaccgggagccagaaccgaagccatggctaacggctggggatggtgacaggaagatgaggagacggccgacagcttggtccccgctgctcggtgctccaagtgaagcgggcctttcatgcagttcatggacgagggagcgcgacgctctactagtccttggctactgccccgccgagcccccgtagccgccgctgcccgctccgggtcgcgctctaggcgcggagtttccccgctgcggggagagccaggggacgcaacccccgccgagttctcaagccaagctgcccccgtctcctccggaaggctcaagcgaaaaagtccggagacggaaagtcagcgggcaaacgaagacatgggatgtgggcagaagggcaccactcagagcgtctttagggagcaggcttccaagctccaaagcgaaacaagagtgggcaaagacccccttcttctctccctccctcccccaagaacccctccaataaggaaagctaacgccgaccgcgctctgcccgccccccccccacgcggcagccctgacagagaagtgtcaagagtgacagggacaggtaggtgatattagatcccctgcggcggcagcagccgctgcagccacgacgcggccctctgagcgcaccctccgcaacgcgcacacgcacacccctcgggcggtcgaacaggagccgggccttgccgcagctcagctccaggcacccaggcgagcgacggaccagatctgcggctccgcgcttccctgttggcctaacatcttaaaaccagaggcgggcttcctggtgccgagacgtcactccgccgcggccctccccagccctctccgcctccgcctcctcccagacccttctccgggtgcgactgacgtggctccgcaccaatcaggacgccccgagccgcggtggagggactgtcctgcctgcacctatcagcagtgcggggccgggctactgcctcgccgtgcgcactgggtctacacaggcaagctcccgggaattcagctcctgcccagcccaaggcgatccggcttttagtacgaacccaaaggtgaagagatgaggctaggagtcgaaggcttgggagaagagagtggaatggtcaagaagagaaaggtacaaggatcaacaagacacccactctttgtgtctcactacatccatttccaatcccccaccccatataaaaaggagacacgttacttaaaactagaaaatttgaaaaacagcaacaaatcacctctccgatcttaaattttccaaacagcctgtcaagtgaatgctgcgctaatctgaagaagctttaattgcaaagaagacagagccctgaaaaggcaggctaataaattagaaatcgagaagcaaatggacccgtcaaaagaaaattaccttgactttaaacgaacaactgtttggtggttcactctggatttatacaagaataaaaagtcgcctcagatcacgttctctgtgatgcttattagtccccagacagaaaacacacaatagaagagaaaccctaacccagcgttttcaaaatgctgaaagcttatccattctacttaacgttgattaagacacatatcctagatctttcaaattccttgtacactgtattaagctcgtcctaacccgagagagccacgctttaaattcgactctcttgtttactttattatcaatcagatttaaatccataaagcctgtagaatcaacaaccttgagctaattatatatgaaatatgccttaatgaatttccatacaattaagaatgttgccaaataaccaatttcaaggataatttttaacagtcattttcttttcccagtgagctcaaggctgtcttgagccattaaagtccaagcaggcagaaggggtgtgtgtgagctaagggcgaaaagcctagaactgcgctcaactagcaaaagcaaaaccttatttatataaaacaaaaaaaatcacctttggagacatcaactctttatagcactgtttccaagcaaatttaatttccaaagaaattaaagaaagaaatccaaacatattcaaaataatttttgaaagtccttttgtcccccagcataggtcagctggagaggacaaactaatctcctctgggtttctgcatgggcgattgttttactatggagttagtgttatcatctctgaatgtgtatttgtttgacattacagtcaatgatttgcaatgccagcatgaagtatctttaaaacactccctccttgtccttgttcacaagattgggaaacttattcgatgtggaacaaagtggatgaagcagactacaaatatatttgcaacttatgtgtctctcctttgccctgaccacccccaaaccctatctgcaactcctccccattttaaacttgcagtccaaagacgcacatgagaattgtttttcagtctttcttcaccagtatcatcccactttaagaataatttagctgcaagggaggaatttcttcatagtaagctttaaatcagcatttctgcttttaaccttttattccactttaccccattccacacatacagacacctgctcagagtaaaacacatcctcatgtgacaggtctgcattagctgaggctcatacatccagctatattaggtcctgcaatcttatcactaaattatacacattacactagcagcctgttggtaaagaaggttaaattaatttacattctgctcattatctggtgcttaaatgacgcattttatcccggagatttggcggagaatctccttctcagaccccacagcgtttcactgaagacaatgctcttacatttgtagtggtttttaatctgataagactctaatttgcttaagtcttttaaataagggttttaaatgtttctagccgttttcttattgaatttcctctaattcccccaagatcataaagtatatgtgtaaagtaaatatttcctcccattgcactgccagccgatgacctataactaagtcaataagaatccagctcttttctgctgaatgtgtttactaatcatattccagtttcttcttttaaacctcagaatagctgtggtccccacaataccatgccccttaaagcttcatttcatgaagggactccatcacattaaagaatgaaaaaaatctccactgtagttagtatacacagcccctcactccttgtttttcaagattcaaaccccagagctgcaaatatttttggaagcttgggtgttaatgccttattttagaaagccgagaagccccacagagccatatagatttctaaacccatctctcataaacccacagaattttgataaaagctctggtggctccactctaccgatggaactttcatcacgacaaatatacatgtatgaaggacctcaatcagcctccaaagtggttgaaaaacccaagggcacgtgactgctcctcatagtgccaacgtgtgcgagatgttggaagcactggggatcagcagcagcctagatgcctaaaaagataaggtgtcctaatttgtgtggacccattgaagtcaagtggtgaataaagacaattatctagataattcagattaaagtaaaagcaaaaccatatctatttgtatatatatattcacatccattttatattacagacacacacacgcacacacacactggctctgtaaacaactgactcaaagtgaggattttctttgcatttttccagcaggagtttcaacattctcctaatctcctaatcactttaca

SEQ ID NO: 6 - DNA, 1920 bp, Homo sapiens
ccaggctgccgtagacacagcctttgctctcccgaaaaacacgttctaggcgccgggattccagatacctgggaaatagagtgcacgcagctgttgagaggcctcgcgcttggcttctcctatcactgaggcgcagaggtgctgtggacagcccagacccacacggcgcccgaggtgaaacagaaccctcagtctccctatgaggccactggcactctcggctgtccccagagctctccgacttagagctgaatgcaaagtaagcgctcgaaatgcagaagtagccggggccgcccacggcacctgcctcgctcggggcgagagaagacgccaggctgaggtcccagcgacctcaggcaccagctccgaaggagggcggggagaccgcaaaggggaagtgcccggagggccaacggcccccgcgcaccctgcgcccctctgaagcgcgccgcctccccgcgccggggactgggacctgcctctggggaatccgcctagaagacggcggcggactggggtcgggcactctccagggctgtcaggccctccccagccctgcacctgccgcgccgccccacctcgccaggaagtctcagagaccccggggatggggtgggagcgccttcccatcgcgggctcaaaaagaaggaaggacgcccccaggggtcgtagaaggaggactagctccaagccacaactttcttcggacccaaggcaggccggctggggctccgcgcctacacggcccctggcgggggtccgcgcgccccgggagccccgcggctcggggaggaaagaggagacaagagacaggcgaggattacggggctgacccagccggggtagggaccatcgtggaaaaactttggcgaggtggggggacgcggaaagagagcggcccgcgccctgcaccttgcgccgggcatcccgcgccagtgcctcgctcccagtgccccgcgccccgcgccccgcgccttgccttcaccccgggccagctgcatcgcgcccgcgccgcaggaaccgtggagttggaaagtgggggcgccgcggctggggggctgcttcagctgcgcctcggccagcgatcggcgggccgggctcaaatccagccaggctgggcaggcggtggccgcgcgactggggaccgggcgccccgccctcctcgctcccctcctccttcctctccctccctccagccccttggcctttttcagcccctaccggatctgctcgtccgctgtcctctcttttctctcgctcttcatatcactctccaccccttcgccttgccttcgcctttcttcctccccttgtctcctgccccctcctcttctcccctcccctctaggggcggagcttctcccctccctcccagacaatgctgtggctgcgtccccttccccgccagctcgtccaggctcccgccgccagcgattcttccgggctgggggtggggaggtggggggggagtgcagggttggggaggatgagctggctcccctcacctccttgctgctgccctctccaagagggatggagacttggcccaagctcctcggttcacccggagctgtgacagccactcccagggaacagtcacgctgccctaccaagcccacctccagcggcctggattccccaggcagaggttgtgggattttgttttttctaacatcccagcttattcccaaaagggtttgagccggacaggggctaaacaggccccttcgacttggcgggccggccagacgtgacagcaatgccaaggaggccaagtttctttgtccatttctcacctcccccttttccatccctggacctcctggcgcccccagtacacagaggcccttgagcagcccggctgcaggttccctatctactcagagttctccccctcacgtgcctatccccaaccctgca

SEQ ID NO: 7 - DNA, 5473 bp, Homo sapiens
gtaatgttaattagcttcatcttaaagaaaaaccaaacaccagagcaaataatgactcctttgcggagaaggagttgtaagggttggggagaggtaattagtgtcataaaagcctcactacaaagaagtttagaatttctctgttctgctgtgcagcagagtgaaacacagtagcagaataattgtgcaccattatcatgataatctaatttgcttctttagaaaaagccactgtttgcagttaggatagtaggaaaacatctagaaaataactaaaatgtaaataaaagtatgaaacaacaataaagttcacttcttaagagaaaaaaagaagagcactcagcgaaaggagaatgaagtatatataaagcaagtaactcttaggtactttgttctcctggatgttacctgcttaaacttgacaacttttacaggcagtatgacagattttttaaaattcaaataaagcttgcttttgtattccactttcaataataaagcatattgattgactcacaaattaaagtttttaaaaccccattaaagtaaaaatactgcttcagagctttcattggtatgtttttgaaagcaagtgtcatagtcaatgtaaatcttcaaaaatttctctgctatttagtacaacagagggtggattttgtgccagggtggcatcctttgtgtaattcacatggcctgaggcttcttgcctttttttcccctagaagagttggaattaagatactaataatcataactgtaataattatcatcatgtttttaaggggttgctgagcctctggagatctcagtgcacagagcgaagcaggagaggcttaaaaaggaaggctctgctgctgatgctgtgatgaccaaggcagcctattattacttttcctcttcaacgtgactgctctgtttttttttttcctgatcctgttacaagatgtggggaagccccttaagaattgtgcatagttcgctacagatggtggtctctgtgcccagagaccgaaagagtatctgttacagcgatactttgtaacagctgcagatgtgcgggcctaaaactgctccatgtgttcaaaccaataataactatcattttattctattttattatctgagcggaaatacaatctgaaacatttaaatttgttccccctaaagctagaaggatatgtgtatgtgaatgtacacaatttgctcctttaaatgcccccaaagcctatttttgctattacatttgcctccacaaccaataaagaaaatctgtttcagtcctaacttcattgggtatggcacgtgctggagggcaggctttggaaatataaatactaatatatgtggtttgttttaaaatctaatgtatttagggtcagtttcgttgccttggttaaatgaatgaacaaagagtgaccaaaatgcgtttatttctccgctatttcacacacagtttgagatcgaccgctaacagcagactgtaaatttctgcacttaacagttactaattttctttatagtctgcacatctataaacctaattgggatatccgcttgacaaacctagaccctgcagagcagactttcaaggaaatccaactccagagaacaaaatactctttggaacttttaaggcatccagagataaaacgttttctgtgggatttttttttaagccttataaaagtaggcccattaggattaaaccacattaaagccagtgcgaggcaaggggggtgtggtttatagaaactctgggagaaagcccagcacagctttcttcttctgggaacatatgttaggatggaaaaaaaaaaaaggaggggagtgctataggactaagatctactttggaaaataagacctctagtaaagatatctctttccttctcatcttacaccagacactagaagcaccacctcccgagtgtgtcccccaagcctctttccaaccccaggctctctctgctccctgggccctcgacctcctggcagctgggtacctgcactcgggcctccgacaggcccagtcgctggctcagttcctctcgcatgaaggcgtcgggatagtgggtctcgtcaaaaagcctctccagctcattgagttgttccagggtgaaattggtccgacttcgcctctgcttgattttggtctggccttcgtcctccatccctttcgcatcctctttgcgatctttcagctccggggacactggagggggcaccccagcggggccacacgtgcatccacacgaacacacacacacacgcacacacacacggacgaaaacagcacagcaaatcctgttaccagatttgtcgcaaaaaagaatagagaatccttccccctcgtggaatcctggtccggcttctcaacccacccggaggaagaatatcccggagaagcgcaaaggtcaagtctgagcggccgcctggggcaaggtgggcagtcatccaccacctccttcacaaacgtacctcgactcaccgcctcactattcaccccccagtcaccggccttccccagcaaacaccaaatggtttccactcactttcgcactcacttgctccgcagcactcacagaaatcaaaggcgcagcgccaggcctctcacagagcaaagtctggacataagggcgcggcaaggccacccactggcctctcacaccggccattcccagaaggctggctcgttctcaggccagctctcaccaccgctggctctctgcctaccgcaaacttgctggtctaatttaggaacaattgggccgaaaggtatcagcgagagcaacagaccccggtgttgtgccgcacagggagccgcatccgcagacgcccctcgctgcccctgggctcgggccaaaccctgcataaggtcccctggacagccaggtaatctccgtcccgcctgcccgaccggggtcgcacgagcacaggcgcccacgccatgttggctgcccaaagggctcgccgcccaagccgggccagaaggcaggaggcggaaaaccagcctccggtggcgggcgaaagcaaccgctctttctgttctctcttcgccctccctcgtggaaacgcagactcgaccctaaacgcttaacccacagagatcaacaggttcaagcggaatattcgcgatcctcggtttctattggttgctcaaagccttttcatgcaaccagcagctcggatgtttaataaaatatgaatttttctgctctgggtttgcacacatccgttgccactttcctgtccttctcctccctttaaaaacaggagctcttctagtgtgagcatatacagccaccatatatatatccccctggaacctttatcctctgcgcccgaatcagagactccgggttttaagaagtcaaagctgagtttagatagtcgaggctgtttgcagttcttcccagcgcaggatccaggccagcatgggtgttaaaaatcatttccggaagagccggtctgcagagaaattaatacttgccctgagcttggaaatcaacaatcccaggaactgcgcccgccgggggttcagacctgaacctcgccgtcaggcgcgctggcgaacctgtagttcgggcctgtagttgtggactcatggccgggaggctgcactgggcaccttgacggtaactccaccactttacaaatttaggaagacctggtgctggtttggaggaagaagagtcgctagatctcggccctgccgggcattctagctacggtgatcttaaatattgccgtattttctagttctcagagttagttttgtggacatttgtcctttctttaggaaggaacattatagtaaacattatgggccaatttaatagcaaagtatttttactgatattgtattgaaatttaaatatgaaaacacacccttcaaattctgccaatgaggtgggaaggctttgtctattacatgtcatctacacagtggatgccactcaaagttttggggcttcgaggagatgtccaaatttcaagttgatccatagacttaataaaatctctatttttgtccccaaatttccaattactgatctaaacaggaacagaccgtgtcataaacaacttaattgcttgcttaaatatgtgattccacgcatgccacatattttcttaattggaaaaatatggcagtacaccagttactgcaggcaccaagtgccaaatcaattttattgttgaactcctttgaattggtatagaacgctctgccattgagataaagacgtttcctaacactgagctagcaccaaaggatttttgctctaagagaaccgagtactgggtgattgaaaacactaaaggaattgtgtaaatatagatccccacctcccccgccgccccccccccccgcccccaacacaccaagaaaccgaaacgcctcgcccgggagaagcagcgtagcctggacctcagctttcgttggcttccttctaccttgaaagagaatgggaagttttggcccctaagatccaaagattcaggggctctgcggagttcgaggggtcttggcggccccaaacacctaggcgaccggagggttaagctttccacctctgccccttctccctcccggcaaactctgcgctagaggctagctttagtcccgccgtctggttcagcaccccctcctgcagcccggccccgcgaacttccacgtccgcctgcgggccatccgggctgcgggcccatcctcccgctggtgaaaaatgcatttcggtggaatgggaacatctgggaagggcgcgcacaaaccccacacgcttccccccacgccacccccacaacacactaggaccccacccatgaccgagcataccaccggacccccacccttccactatcactctagctgacaaagctggggtccagggccctctccgtgtccctctcccctccccgctgggcctcggagtcctctcccgcccgagaggagtccggaaggcgggaaggggaaccgctgccgggggtcagtcaggtcgttaccctccgtcagtcgcgggctgcccggctccctgcttctctcggcggcgcccatgtccagctcccggacgggagagcgccctcctccagctcctccgcctgctcctcctcctcctacacctcctccgcctcctccgccgccgcctccgcctcctccgccgccgcctccgccggccgcccggactgccgggctgctgcggtcgtcgcggcccgcctcggtgcagccggtcggctccttggccccgcgcagcggcccgctctccagcacctcccggtacgtgatcgcctccttcttctccttcactttctggtcaaaagacttggagacgaacgccgtaagttcttccatcgccgccgcacgtcagcccggcgctcaacctctgccagcagagccccgctctttttttccttcttctttttttactgctccagcccccccaataataacacatcaatgggacaggaggtgggg

SEQ ID NO: 8 - DNA, 1405 bp, Artificial Sequence; identical to SEQ ID NO: 1
  Artificially methylated Sepin9 A at Cp[AT]

SEQ ID NO: 9 - DNA, 2365 bp, Artificial Sequence; identical to SEQ ID NO: 2
  Artificially methylated Q9HC74 at Cp[AT]

SEQ ID NO: 10 - DNA, 4261 bp, Artificial Sequence; identical to SEQ ID NO: 3
  Artificially methylated GSTPi at Cp[AT]

SEQ ID NO: 11 - DNA, 6343 bp, Artificial Sequence; identical to SEQ ID NO: 4
  Artificially Methylated PITX2 A at Cp[AT]

SEQ ID NO: 12 - DNA, 9001 bp, Artificial Sequence; identical to SEQ ID NO: 5
  Artificially methylated PITX2 B at Cp[AT]

SEQ ID NO: 13 - DNA, 1920 bp, Artificial Sequence; identical to SEQ ID NO: 6
  Artificially methylated RASSF2A at Cp[AT]

SEQ ID NO: 14 - DNA, 5473 bp, Artificial Sequence; identical to SEQ ID NO: 7
  Artificially methylated SHOX2 at Cp[AT]

SEQ ID NO: 15 - DNA, 1405 bp, Artificial Sequence; identical to SEQ ID NO: 1
  Artificially methylated Septin9 A at ggcC, agCt, Ccgg

SEQ ID NO: 16 - DNA, 2365 bp, Artificial Sequence
  Artificially methylated Q9HC74 at ggcC, agCt, Ccgg
gtggttgtggtgggggtgttagctgtaggggtgtttttggtgggtgggagttggtggtcttttgttggtgttatgggatttgtatgtttgttttgtgttttttggtttttgagtttataggccgggattttgtttgttagttgtgtgtgttgttgtttaatttttgtaggtgtagagtgtgtggtggtggtgatagagaattttgtttggttgtttaaatatagttttttgtagaaggattttgtgtctggggaaggggaggaatttttttttttttgggtgtttgttttttttgttatggtctggtctttatatttgtttatatttggtcgtagtggggtgtctggggggaggggttgaggtcgtgttttttgttgttttttgggtgtgggtcaggtggggaggaggggggtgttctggttgtgtgtttaggattgttttttagtggtcatttgggtcttagttttttaggtctggtcttgataggtgggtggagtagttagtgtgagatagggaggccggtgtgggtgtgggaatttgatttgtctgggaggtgggggtggggtgggggtgtagtgtgtggggaggggccggtgtttgttttttttttttatttatttagctgagttagggggtctaggggtttttctggtggttagctttgtattgtaggagtgtgggtgtggtgttttagttagtgtgtagggtctgggtcttgctgggggtgtttttttgttgttgttttttgtgtgatttgttgtttattagttattatgttggattttgtggttaatgtgtagctggatgggattattttggattttgaaggtgggtgttgggttggttgttgtggtcgtggatgtgttggagaggattttgtgggtgggtctggtgtgggatgggggtgtgttgaggggagatgggagtgtgttgaggggagatgggatttttaatttaggtgtttttttgttgagagtgttgtgtgtttctggtcttgtgtttgtgttgtttatgtgggggattttgttaggggtatttgtgtagattttgtgtgtttttataggattttgtgtttgttttgtgtattgttgtttgggtttttttttttttattgttgtttgtgtttgttaagtgatagtgatttttttgagggtttgtgaggttgttttggaattttttaggatgtatagttttattttgggaaatttattggttttttttttttggttttttctggtggtttttgggtcttgtttggatctggtaatgggatagggaggttgttttttatttttgattgagtggatagttgtgttttgtttgggtggatagttttttttttttttatgttagttttggggtcgttaagttgtgtagtttgtgggccgggagtattgaatggatatagtttaggttgtggtagggtttagagtgggatgttttatggtctttatttaggtctggggatatttttatttgttttttagaattgggtcgtgggggatagaaggggtctgtgtgtgggtagggagagtattttggtttttttttgtttttggggtttataaagtgtgttgggatttgtggggttgttttgtttaagtttgggtttggtgtttgtgtttttgagtttgtgagtgtgtgtgtttttttgtgtttttttgattgctggtgttggggttttgtgttttgtgtttgtgggagtaaatatagtaggtgaaggggaagcttatataatggtttttagtgttttggggtagggtttttgaggggtgggtctgtttttgctgggatttggagtttttgttttttggagaggtttttaggttgatttgggtagagttttttggtgggccgggagggggaaaggttgtgttgaaatgagtaaattgtttaggtgttaggtcaagctgggaggtgattagtttgaggttttttttgttttatggtcagaattagggttgatatttgggtgttttgagtttagctgtttatatggtctatttggggttagttttatttgagtgggggaggtggggtcttttgggggattagaattttggttggatgttaagtagagtgttagtggttgttttttagggttgggtctgaggagggtgtggggtggtgaagggatgggagggggttgtgatttagtggtcattggtgttgtgtagagtgtgagctggaaatattgtagttattttgttagcttagtggtgaaagtttttttttaggttttatttttttgtatttttgttttttagagggaggggaggtttgggtttgtagagctgggagggtttgttgtttttgttttttttttttataatatttttttatttggatatttttgggtatatgt

SEQ ID NO: 17 - DNA, 4261 bp, Artificial Sequence; identical to SEQ ID NO: 3
  Artificially methylated GSTPi at ggcC, agCt, Ccgg

SEQ ID NO: 18 - DNA, 6343 bp, Artificial Sequence; identical to SEQ ID NO: 4
  Artificially methylated PITX2 at ggcC, agCt, Ccgg

SEQ ID NO: 19 - DNA, 9001 bp, Artificial Sequence; identical to SEQ ID NO: 5
  Artificially treated PITX2 B at ggcC, agCt, Ccgg

SEQ ID NO: 20 - DNA, 1920 bp, Artificial Sequence; identical to SEQ ID NO: 6
  Artificially methylated RASSF2A at ggcC, agCt, Ccgg

SEQ ID NO: 21 - DNA, 5473 bp, Artificial Sequence; identical to SEQ ID NO: 7
  Artificially methyalted SHOX2 at ggcC, agCt, Ccgg

SEQ ID NO: 22 - DNA, 1405 bp, Artificial Sequence
  Artificially methylated Septin 9 reverse complement at Cp[AT]
gcgggcggcgtcctgagcgcaaaacgtgaacccgagtcgccaagtttgggcgctgctggacggtcccatctggaggccgtcccgtgccccactaagtagaggagaaaccgaagagaatccgaagaaaggatgctgcggcctggaccaccagccctagaggctgaacccaaggacacccctccacctagccccgaccccattcacccacacagacgcacagggacccaaagcacccggccgacctggaaagtcagcgattcctgcgagggtgcaaggggcgaggaagagggagcgtcccccagggcagcccctccgacactcgagcaagggctggagacagcgcaggggacggtcggctcaggtcgaaagcggcccgacagcggccctgtcctgggaggaactcgacctgcagtgtgcccgccgcggggactcgctcagctccgggggcgcctcgccactcccggccgcaggcactcaggtgagcagcgctggtcccgggacaccgacccctccccaccccgggcgcgaagcccacctgagtaagacttcttcatggtgcctccgtggccgccgctcccaggaaagtgtggcggcgaggcagcggggcgcgcgctcccagggcgctaatcctgggccggtagtaggaaggcgggaagagggggcggcccgccgtctggagtgcaccgaccgggccccgccccggccccgcccccgccccgcccctccccggagatgcgcatagaaccccggcccagccggctgtggtcccgcccctgacccgccccctccccgccccgtgaacgtgcgcgccgagccccacccccgcccacccctgcgctgcgctgcacctggcggagcggggctggcgggcgccgggcctgggagggggcgcccccgcgcggcagcgcagaccagaccagaccaggccaggccgggggtgggggccgcctgcgtggcccgccgcgcccgcagctctgcacccccagctccccgcgctggcgccaatggctggttccgggagtcgccgcacttcccagtcccgagtccgggcggggcgggcccggccaggtggaagcgggcggaggtgcgggcgctccgggcggccccgccgggcgaggcggcggcgccgggcaccgcggcggcgccgggcacagccgggggtcggagccggggtgccggcttagtgggccggggtagggcgggacaggacacctgtcctgctacttttctggtaatcaaaagggcagagtgcgtcgattgagttggagccttagtttcctcacctgtaaatgggcgcgttggacagatgatcatttgttctccctgcgctgggcaccgtgcgcagctcggtgtatcggtgcagcggggcagacacagggagccgccctttacaactcgggtaacg

SEQ ID NO: 23 - DNA, 2365 bp, Artificial Sequence
  Artificially methylated Q9HC74 reverse strand at Cp[AT]
gcatgtgcccaaagatgtccagatgaggaggtgttgtgggggaggggggcgggaacagcaagccctcccagctctgcagacccagacctcccctccctctgggaagcagggatgcaaagggatagagcctgaaaaagggctttcaccactaagctgacaaagtaactacgatgtttccagctcacactctgcacagcgccagtggccactggatcacaaccccctcccgtcccttcgccgccccacaccctcctcaggcccagccctgaagaacagccactggcactctgcttggcgtccagccaaagttctggtcccccaggaggccccgcctcccccactcagatagggctgaccccaggtgggccgtgtgggcagctgggctcaggacacccagatgtcagccctggttctggccatggagcggggaggacctcaggctggtcacctcccagcttggcctgacacctggacagtttgctcatttcaacacagcctttccccctcccggcccaccagagggctctgcccaagtcagcctaggagcctctccgaggggcgggggctccaggtcccggcagaggcaggcccgcccctcagaagccctgccccagagcgctggagaccattgtgtgagcttccccttcgcctgctgtatttactcccgcggacgcaggacgcagagccccagcaccggcagtcaagaggacgcaggaaagcgcacgcactcacaggctcagagacgcggacgccagacccaggcttggacagagcagccccgcaagtcccaacacactttgtaaaccccgaagacaggagagagccaaaatactctccctgcccgcacgcaggccccttctgtcccccacggcccgattctgggaggcggatgaggatatccccaggcctggatgggggccatgggacatcccactctagaccctgccacgacctgggctgtgtccgttcggtgctcccggcccacgggctgcacaacttggcggccccgaaactggcgtgggggaggggagggctgtccacccgagcaggacgcggctgtccactcagtcggaggtgaggaacgacctccctatcccgttgccgggtccaagcggggcccgagagccgccggggagagccaaagggaggggaccgatggatttcccagagtgaaactgtgcgtcctggagagttccgaggcagcctcgcgagccctcgaggaggtcgctgtcgcttggcaaacacaaacaacaataaaaggaaggaaacccaggcggcagtgcgcagaacgagcacagggtcctgtgagggcgcgcagggtctacgcgggtgcccctaacagggtcccccacgtaggcggcgcgggcacggggccgggggcgcgcggcgctctcagcgggagggcgcctggattaggggtcccgtctcccctcagcgcactcccgtctcccctcagcgcacccccgtcccgcgccaggcccacccgcagggtcctctccagcacgtccgcggccgcagcagccagcccagcacccaccttcgaagtccgaaatgatcccatccagctgcgcgttgaccgcggggtccgacatgatggctggtgggcagcgggtcgcgcggagggcagcggcgaggaagcgcccccggcggggcccgggccctgcgcgctggctggggcgccgcgcccgcgctcctgcagtgcagagctagccgccggaggagcccctaggccccctggctcagctgaatgaatgggggaggaaggcgggcgccggcccctccccgcgcgctgcgcccccgccccgcccccgcctcccgggcggatcaggttcccgcacccgcaccggcctccctgtctcgcactggctgctccgcccgcctgtcaaggccaggcctggggggctggggcccgagtggccgctgggggacagtcctgggcacacgaccggagcgcccccctcctccccgcctggcccgcgcccaggggacggcgagagacgcggcctcagcccctccccccgggcgccccgctgcggccagatgtgggcggatgtggaggccgggccatggcgaggagggcgggcgcccagaggggaagagattcctccccttccccgggcgcagggtccttctgcaggaggctgtatttgggcagccaaacaaagttctctgtcaccgccgccgcgcgctctgcgcctgcaagggttaaacggcagcgcacgcggctggcaggcaggatcccggcctgtgggctcaagagccgaggggcgcagggcgaacatgcgagtcccatggcaccagcgagaggccaccaactcccacccaccgagggcacccctgcagctaacacccccaccacgaccac

SEQ ID NO: 24 - DNA, 4261 bp, Artificial Sequence
  Artificially methylated GSTPi reverse complement at Cp[AT]
tatttctctttgtttctctctctctttttttttcttcctcttctagtttgtgaggttcagtaaacacagccaggctgagggctccaggaagccactgactgtgctggaggagctgttttctagtcctctgctctgccctcccaccgacctcgaggctgagaacccctaagccccgtcccaggaaacacagtgctcatagtagctctcttagaaattttattggtcctggagaaaggaaggcaaactctgcctcccgctcagagtccccccaaccctcactgtttcccgttgccattgatggggaggttcacgtactcaggggaggccaggaaggccttgagcttgggccgggcactgaggcgccccacatatgctgagagcagggggaacgcatccaggcagccaggggctaggacctcatggatcagcagcaagtccagcaggttgtagtcagcgaaggagatctgcagggcaggggggctagggactcagccagcgggagcaggctggaggaattgggggcagagggcctaagcccatcccctaggtctgctctgctttgctaaacaaatggctcacacctgtgtccatctggaagcagagggtggcgaggaaggaacagcatggggccagatgctcacctggtctcccacaatgaaggtcttgcctccctggttctgggacagcagggtctcaaaaggcttcagttgcccgggcagtgccttcacatagtcatccttgcccgcctcctgccagacaccaccatgtatcatcctactctcatccctcccagcccctgagacacccccgtctgccccaggccagacaccagagtcccagattctcctctgcttgctccccacaaccaggctagtaccaaatcctgtccacttcagctgccaactcatctctattccattctgcctgtccatccttgctgggttctctcaccagatgattgcaaaagctttagagctggcttctctggaggatccttctagacctcacattcagacacagccctgttcagacttctcaatggcccccattgcccttaggagactccaaaccagtgggttcaaggccttcgggacctgggcctactgcccgcccatctctatctccttacccacccgacacaaatgcaagcgtacacacacacacgcacacacacgcacacgcacgcgcacacacgctgcctctgctgaactggtcccaggtccccaaatgtgctctgtgtctgcatattttcctcagctaaaagtgccagcacctccatccagaaactggcgacaaatcctcctccacctctggctactccaggaagccctcgccaccccaggagatcagaaaccaccagttgctggaggtctctgtccttgcactcgcccccatgacccgttacttggctggttgatgtcccaggcaataagggtgcaggttgtgtcttgtcccaggcccctgggcccctggcccagagctgacccagcccctgcaccctgacccaagaaggggtcagcccaagccacctgaggggtaaggggggtgagggcacaagaagcccctttctttgttcagcccccagtgcccaaccctggtgcagatgctcacatagttggtgtagatgagggagatgtatttgcagcggaggtcctccacgccgtcattcaccatgtccaccagggctgcctcctgctggtccttcccatagagccctggggttgggtggaggggagcaggccgcgtgactgggcgcctgatcaacacacagtcactggggatgggccaaccagggggctgtctgtgagccccagcctgggaggaggggaagaggatgtgcgtggaaggatgagagactgccacacagcaggtgctcagagctcacctgacacctgggaggcagcctggcacagggcaaggattgcaggcacccaggcttgaccttgggcaaactacgtaacctcagtgggtctcagtttcctccactccagagggctgcggggcagctgatttaaacaaaagggctccgggggcagaggcttgcccatgcctgccctggacttggaggttcaagactcaccaagggtgcggcccaggtgacgcaggatggtattggactggtacagggtgaggtctccgtcctggaacttggggagctgcccgtatagctgttgggggaggcatggctcagggaggggcactgagcttgggcgtcccccgatcctagtcacagccccctaaggcccagcaccccctccccttgcccgggcatggtcacttacgcaggaggctttgagtgagccctcctgccacgtctccacggtcaccacctcctccttccagctctggccctgatctgccagcagcatgcgcagggccgcgcagcggcctgcggggagggagaagtacgagatgtggggaccgggccgactccgcctcgcagcaacccggggaggggtcaggagtgcagggagggaacaggtaaacaggttcctccgaagatttcacacaacactggggcggggagcaggcatggcgggagaggcggggaacaggaaggaggcccggggtaaaagccacacgacggagggataagggggttcggatctctccgggtgggcgaggggctgtgggctgcagccccagcccctgcctcccttccctgccagacacatgctcctacctcgaactgggaaatagaccacggtgtagggcggcactgcagcgaacaaagaaaagtttgctggagcccgggggaggatgccaaggcgcggtgagcgcagcctgccccccctccccgcccccggggtcccatccctccccgaggcgctccgggccccctgaaagccgctaacggcactggggacgtcctgggtcccctaggcccccgtcccgggtctcgaggtgggcgaggagccctgccgggagcccgggcctgatgctgcgggttggccccatgctgggagctctgagccccatccccggggagcgggccgcgcgtactcactggtggcgaagactgcggcggcgaaactccagcgaaggcctcgcggcctccgagccttataagggtggtcccgccccgctccgccccagtgctgagtcacggcgccggccgctcttctggagggtcccgcggactcccgccggccccagccccggcggccgctgcaccccgggcgtcggccgcagaggggcgccctggagtccccggagtcgccgcgcagctggccggggaagcctttccctctttcccaggtccccagcggggcctagggagtaaacagacagcaggaagaggaccgcagcgaagtgtgcgcagcgaactggcgcgccgggacatcgcggggggaaattccctaagaccgctgcgatcccggagcttgcacacccgcttcacagggcaggggagaggggtggaggccgcttagaggaaaggaaattgctttattttattttattttattttattttattttattttattattttattttattttattttattttattttattttgtgttattttattttattttatgacgtagtctcacgctgtggcccaggctggagtgcagtggcgcgatctcggcggctcactgcaacctccgcctctcgggttcaagcaattctgcttcagcctcccgagtaggtggaattataggtgcgtgccacatctggctgatttttgtatttttagtagagacggggtttcaccatgttggccgggctggtctcgaactcctgaccttaggtgatctgcacgcctcggcttcccaaagtgctgggattacaggcgtgagccaccacgcctggccgtccaacttttatttgaagttctggggtacatgtgcaggatgtgcaggtttgttacataggtgtgtgcgccatgatggtttgctgtacagatcatcccatcacccaggtattaagcccagtatcccttagctattcttcctggtactctccctccccagcaccccgctcaacaggcaccagtgtgtgttgatcgccgccatgtgaccatgtgttctcattgttcagctcccacttataagtgagaccatgcggtctcgctggttttctgttcctgtgtgagtttgctgaggctaacggcttccagctccacccatgtccctgcaaaggacatgatcacgttccttttagtggctgtgccttaggctattttctttggctttgctgcctactttctgttgatttgcagatctccatttattctagatattgatctcttgtt

SEQ ID NO: 25 - DNA, 6343 bp, Artificial Sequence
  Artificially methylated PITX2A reverse complement at Cp[AT]
tctgcaaaacagaagagaaggaaggctgtaagaagcggcggccgtcgagtgagcagggctcagatgagactacgttacactagctgttaggcgcctactgtgtgctaggcttcaggcgtgtttttccgacctgacagcctctggcatgtgcagcagcatctccagcctagcctcgggcccaggacatttatttatcaagaggggatctccctccagagttgccgcaaaagtgcccagaggttagaggactataaagccacagtgtgctggggaggctgtggacctactttcaagaatctcggtgccggggttaagaactcatctgaacgcaatggcagcgggagtgggtgggtggagaggacttttctctttgggaagctgtatgcaaagaccacccttcagtgcttgtccattagttggagctcggtaaacatttgtagaacatcagcgccaacgtgcccctgtcctagacagcagtttccctcggttttctgtaattctgaaacgaacgggctcttggcctagggtgtttcaggagcgagctgagttcgggcctctcatccatcaggagccacttttccatatttagccacactttctcctagagatactaacccggccatttatttacttactacaaataattaccctaaagtatgatttaagatcgcagaggagagacactgggtggactgagcgagactgaggagagcagggcaaacgttcttggagggtttactgcccgccaaggacggagaaatagctctggtataactgctacccagttctccccctttctctcccgggcgagccaaatctttttcacgttttcaaccacaacgcagcgagccaagcatttaacgcgctcccccttctctgccacaggcaagccgggagaggtgggtctcgaggggctccaccgggtgggtagaagagccgcggttgctttaaagacaagaaaagaaggtccagggctccctaggccccttcgatctcagcgcctgcctctctccacgctaaccagggtacgccgacgaccggagggcccacttcgcgcgggtgcggggatcggggtgggagcaagcgttgtcgggttggcggaggcacagaggcggggcagggagctgcgggcctgcctctggcctgagtaccgtttccctgcgtctcggcctctcctgaagggagctgggccctggggagcctctggccaaggtcgctgcctacaggaggggctgcccggcgctgtggcgtggggatccagggtggggacggccaggcggttcccccacccgctagcgagaacgcgggcggggactctgccgattcgatccttgtgggcccgtgggcccagaagtagcagtttggcggctccagatttagtgattctgcagtaaaatcacaggattagtccctgattgagatgtctgttcgtgagatattacaaaattcattatcacagctttctactaactcgatatgaagtaacacagatgggattttattagtccagacttcaaatgtttacttatgataatttcggaggaaatttgcatgtcatcatcatttcgataatcttttttttttatatgtctgaactggctgcattattagctggtagccggagcactgcagatggtaactgcaaatagtttttatttatttattttttttaaagaatgaaatatacaaaagaaaaagattgcgttgcttggtgtaaagtcagtcaattattacacattcttccccccacttccccgtgcttcagtgctgaagaccaaacaaagcaatacaaaacaaatcttcaagaactcatagagctccactctaaggactgaaaagaaggtcaaggcgtgttccttagctcactcctacatgtccttgtgacttggagatttattttgcagtcaaaatgagccttgagacttgcatttttatgcttcatttaatgaccaggcctactagaagaactgagtctaaataactggggaagataattttttaaaaagagacctccaattcccgcctgctgatccttaaacttgccctatcaagacaagtcttctgtgagaaatttggctgccagacttcggaactggcttcaatggctaatctcacaaattgagatgggagacttttcctgatgggaggtagttctcacccccaaagttcatgttctagttggaatgtatatgccaaggactcttgttttggccaacttgggttttatattgtgagcacacaaaaagcactacacggctaacggaggacgaggaaccatggcaaagcaggcaggcaagccctaagaaataaaacaatttgctaaaaaataatttctgatgactaccgcaagactgaaagtgcaggaaaaatacagttcgaataatcccagatcctttcacatttccccccttttcatacactttgttaccccataacaaaatctttaatggaaagtttaaaaataaacagcacaggaacatgtgttttaaatgaactaaattgtgaaattagccagtaaattaatttgtagtaagtaattatttaaggaaattaaaatactgctcagttcagttctgtattttaccatgtgtatgcgttctttacaaccaattaatataagtgctttaggaacatttgaagacaaacacgcttaacttaaggaacaaagcacctaaataatttaagtgtaattttgctgagttaaagtaaaacattccacaaatgaagtggctatttaattttttagggaaagtttggttattgaaatgttgtatgctcatgttacatcaacaaaaatcttcaatttattttgcttatgtgctttgttttcttgatattattggtatttgaattttagatggatttctgccaaaatgatattttgtgtgataaaagcatctttagttttgattgatagactaaaacaaatgcaaggaaatttctttaaatcagattaatttttcataaaaatattttagaatgtatgaattctgatatttacatttataatggtaaaagttttttccgtttagtttagtaagacaatactcacacaaaagagtaaaaaaaaatcacaccaccttatgatagtttgatttctaaattgcttaagaaagtaaagtggttaaactggaaaagaggaacatatttcggaggtttagaatcgaaaatttttttcttaatctccagctggaaaataattctctgcatccatttaaagtgtatctcctgaagtgccagattggagttgactggtgatcaatttaaaggagttacaatccaaagaaatggtgagagcttggcatccaggcctggctcccaggtaattcgcttgggcctgagaggtcactaactgccagttaagatggaatctttttcttttcttttttttcccaatggataacaatgggaagggggctaatcttccagtagctgaaactttgtacccagccctttatcttgagaatgctaatccttggcccgaggatttgttcctgcagtgttggcaccgagatttaagggaagatacctcgttttaaatgccagccacggtctggcttccctctcgacttcagcaccctgtagattgttagtgtctgtggcgggggacgaaaggaacagggctttgcaaggtctgtttgccgactgcgttaccttgggcgaaacttagccccaaaagccacaaatcacctacggtgaagattctccgaagtggaacaaatttccagactcgcattatctcacatccctgcgggatagatggcctccacttaccggctaccgggagagagctgctgtctccgcgtcccactgcttcccggggcgatttccagcgagccgagcctccggctgcacggcaagcgcccgaaagccgggcctgagaggactgcagggctcctgagggtgccaagttccgaaggagtccacgggtgcactggggcctccgaaatctagccgccactggcagtttctttctgctcctctccagctttctcgctcggtctcgcactctctctcctctccctccctctcatccctctctcttccctctgctcctactccgtgtggggagtgacgtgacgtcagcagagattccaccaaactccactgcacagtggcgcgcgggcgccggcgagcccgctgcgcggctggcgatccaggagcgagcacagcgcccgggcgagcgccggggggagcgagcaggggcgacgagaaacgaggcaggggagggaagcagatgccagcgggccgaagagtcgggagccggagccgggagagcgaaaggagaggggacctggcggggcacttaggagccaaccgaggagcaggagcacggactcccactgtggaaaggaggaccagaagggaggatgggatggaagagaagaaaaagcaatctgcgccaacccggcagccctaataaatcaaagggggagcgccagggcagcggggagacagaaacgtacttttggggagcaaatcaggacgggctgggaggaagcgacagggaaagtggcccaagagacggaacaaaggacaatgttcatggggttgtttgggacgaggcgtgtggagtgtgggtgtgagcgtgcgtgtgtgaccttctttcaggcctgcagagttgaggaaagaggtcacagcaaagagggactgcggagggaggaaagtgagagaccggtagagggcgggagtggaggtgggcgcggtggggatgggagaggatgagtgaagagaaatctagaagaatggagtgagctagtgggagagggtgggagggccacagccgggagcgaacgagctaggcttgtcagctggggaaggccgggacgctgggcccagcttagctgggacaccgcgcccgaggtcaaggcgggtggaccaggcatgctgagagtgtcggcgcacaggtgggcacggccacgcactgacccagtgttcacgaagggtttgcactggacaaggctcagacgctcatagagtctagaatttcctctgctgtacctacattcaacaagttcaccctgggtcacggatatctcattttttaaaatgacgaggttaaggttcctggcgaggatggtattaaattgcacgggatagaagtgggggtgggggagagagtttccctcaagtccacatttgctcctgcaaagcaaagagtatgtgaaattacagggcatattctcactcgaaaagtgtgccttacttctgaaccctgattttctgatttcttgacttgagcaaagatgtgtattttggtagtgagcagaatattttggctctgtcctgcctctgagtggaaggactataaatataattcgcctggaggaccaggtgtgaaggcttctgccaggcatatgggacaatgttttttcaatctcaagggcatcctgttaatgtatgtttttggaaagtgccggaacacagccattgctcctggattcggattttcccaccaatattaattcctgcttgagagcaaaactcaggcccgctattaaaaagacatctctttggtccctaattgagaataaagttccctctaaaagttgtattgctcttcctaaatcaatataccaatactcgcaattttagaaatatatagtgactcgggagaatgtgcataaaatagatacgtttaaaaaagcttggcgcttaaaactaaccctagtcactatataggtgctgggctttccctacttttgggggctgtctggaacatgttatgtgttttcttgaattactccgtgttttgaattcatttgagttagcagtaaaaacaggcaaacaaacttgctcaatttgttttgagtgctaaatcccttcactttgaaatagctaacagtcgacagatggactcattttatggaaagggttagcctcttcagccacgaagaaaactgattagagatctacattttaagccatttctaacctccacgtaacatccgtgaaaactcaaactttctctctttacccagtggaaactcaaagcagtgttatttaaggggagagaaatgagggggaaaatgcccacgtgctgtttaattgtatttcctctctgactctgagaatttctatttctggtttttgaaatctcgccgaggcaagaaaatcaaatttcttcaacaagtcccacaactgaactctagttacaggacaccggaaagtgcagtccgagaaagacatcttcacctctgcccatcgacgatttttgcagcctccccattcctctgagtaatgggctaataatcctccctttttttcttttcattttgtagagattaagaggcgctcgtagcagaacggccttgccttcagctggtggcgaggataggcaatc

SEQ ID NO: 26 - DNA, 9001 bp, Artificial Sequence
  Artificially methylated PITX2 B reverse complement at Cp[AT]
tgtaaagtgattaggagattaggagaatgttgaaactcctgctggaaaaatgcaaagaaaatcctcactttgagtcagttgtttacagagccagtgtgtgtgtgcgtgtgtgtgtctgtaatataaaatggatgtgaatatatatatacaaatagatatggttttgcttttactttaatctgaattatctagataattgtctttattcaccacttgacttcaatgggtccacacaaattaggacaccttatctttttaggcatctaggctgctgctgatccccagtgcttccaacatctcgcacacgttggcactatgaggagcagtcacgtgcccttgggtttttcaaccactttggaggctgattgaggtccttcatacatgtatatttgtcgtgatgaaagttccatcggtagagtggagccaccagagcttttatcaaaattctgtgggtttatgagagatgggtttagaaatctatatggctctgtggggcttctcggctttctaaaataaggcattaacacccaagcttccaaaaatatttgcagctctggggtttgaatcttgaaaaacaaggagtgaggggctgtgtatactaactacagtggagatttttttcattctttaatgtgatggagtcccttcatgaaatgaagctttaaggggcatggtattgtggggaccacagctattctgaggtttaaaagaagaaactggaatatgattagtaaacacattcagcagaaaagagctggattcttattgacttagttataggtcatcggctggcagtgcaatgggaggaaatatttactttacacatatactttatgatcttgggggaattagaggaaattcaataagaaaacggctagaaacatttaaaacccttatttaaaagacttaagcaaattagagtcttatcagattaaaaaccactacaaatgtaagagcattgtcttcagtgaaacgctgtggggtctgagaaggagattctccgccaaatctccgggataaaatgcgtcatttaagcaccagataatgagcagaatgtaaattaatttaaccttctttaccaacaggctgctagtgtaatgtgtataatttagtgataagattgcaggacctaatatagctggatgtatgagcctcagctaatgcagacctgtcacatgaggatgtgttttactctgagcaggtgtctgtatgtgtggaatggggtaaagtggaataaaaggttaaaagcagaaatgctgatttaaagcttactatgaagaaattcctcccttgcagctaaattattcttaaagtgggatgatactggtgaagaaagactgaaaaacaattctcatgtgcgtctttggactgcaagtttaaaatggggaggagttgcagatagggtttgggggtggtcagggcaaaggagagacacataagttgcaaatatatttgtagtctgcttcatccactttgttccacatcgaataagtttcccaatcttgtgaacaaggacaaggagggagtgttttaaagatacttcatgctggcattgcaaatcattgactgtaatgtcaaacaaatacacattcagagatgataacactaactccatagtaaaacaatcgcccatgcagaaacccagaggagattagtttgtcctctccagctgacctatgctgggggacaaaaggactttcaaaaattattttgaatatgtttggatttctttctttaatttctttggaaattaaatttgcttggaaacagtgctataaagagttgatgtctccaaaggtgattttttttgttttatataaataaggttttgcttttgctagttgagcgcagttctaggcttttcgcccttagctcacacacaccccttctgcctgcttggactttaatggctcaagacagccttgagctcactgggaaaagaaaatgactgttaaaaattatccttgaaattggttatttggcaacattcttaattgtatggaaattcattaaggcatatttcatatataattagctcaaggttgttgattctacaggctttatggatttaaatctgattgataataaagtaaacaagagagtcgaatttaaagcgtggctctctcgggttaggacgagcttaatacagtgtacaaggaatttgaaagatctaggatatgtgtcttaatcaacgttaagtagaatggataagctttcagcattttgaaaacgctgggttagggtttctcttctattgtgtgttttctgtctggggactaataagcatcacagagaacgtgatctgaggcgactttttattcttgtataaatccagagtgaaccaccaaacagttgttcgtttaaagtcaaggtaattttcttttgacgggtccatttgcttctcgatttctaatttattagcctgccttttcagggctctgtcttctttgcaattaaagcttcttcagattagcgcagcattcacttgacaggctgtttggaaaatttaagatcggagaggtgatttgttgctgtttttcaaattttctagttttaagtaacgtgtctcctttttatatggggtgggggattggaaatggatgtagtgagacacaaagagtgggtgtcttgttgatccttgtacctttctcttcttgaccattccactctcttctcccaagccttcgactcctagcctcatctcttcacctttgggttcgtactaaaagccggatcgccttgggctgggcaggagctgaattcccgggagcttgcctgtgtagacccagtgcgcacggcgaggcagtagcccggccccgcactgctgataggtgcaggcaggacagtccctccaccgcggctcggggcgtcctgattggtgcggagccacgtcagtcgcacccggagaagggtctgggaggaggcggaggcggagagggctggggagggccgcggcggagtgacgtctcggcaccaggaagcccgcctctggttttaagatgttaggccaacagggaagcgcggagccgcagatctggtccgtcgctcgcctgggtgcctggagctgagctgcggcaaggcccggctcctgttcgaccgcccgaggggtgtgcgtgtgcgcgttgcggagggtgcgctcagagggccgcgtcgtggctgcagcggctgctgccgccgcaggggatctaatatcacctacctgtccctgtcactcttgacacttctctgtcagggctgccgcgtggggggggggcgggcagagcgcggtcggcgttagctttccttattggaggggttcttgggggagggagggagagaagaagggggtctttgcccactcttgtttcgctttggagcttggaagcctgctccctaaagacgctctgagtggtgcccttctgcccacatcccatgtcttcgtttgcccgctgactttccgtctccggactttttcgcttgagccttccggaggagacgggggcagcttggcttgagaactcggcgggggttgcgtcccctggctctccccgcagcggggaaactccgcgcctagagcgcgacccggagcgggcagcggcggctacgggggctcggcggggcagtagccaaggactagtagagcgtcgcgctccctcgtccatgaactgcatgaaaggcccgcttcacttggagcaccgagcagcggggaccaagctgtcggccgtctcctcatcttcctgtcaccatccccagccgttagccatggcttcggttctggctcccggtcagccccggtcgctggactcctccaagcacaggctggaggtgcacaccatctccgacacctccagcccggaggccgcaggtaaggcgccgcgccgccctgcagacattcccgctcagctgctctgcgccacccgctccctctcgccccaaggaagtcagcccctccggggggaggcgtggtgggagtggtcgttcgcctggctccccgcagaacttccgggagccggaattttgactaccccgcatccctttagttctccctcgaccggcccggctcctggggcgctaagggcgcgagcaattctgccgccctctctattcgtaccctggcctcccttctgtttcctgggtcacaaaaatcccagcatcttgattcgaggaccttcagaggccgccgacctctgtccctgttttcctctcggctttcagctcccgaggagctccactcgttaggaaattgcctgaaaccactcagaaatgcccttcgcgaagaggcattttttttttttttttgggaaagggccggcgaacttcggtgcccaaccgaatccccacatcttttcctagccttcccaaaccgcatggaaatctgagctttctgcgagggggaggggggtctgtaaaccacgcgcgtgtgcgcgtcccaggagatttggtgtgtctgcgcagaggtgtataaatatacttgaaagcacaggctataaaagtgaatgtgccgctgcagtgagataaacatgtaaataaaacgtgcggcgctgggggaggggaggaaatggggcgcggacacccacacttgcgcctgcacaccccacaggcgcagcgctcctcgcggcccggagccgccgcgcgcaccctcctccggcgccaggcagcccagctcttccacggcttctgccgccggtccagttggcgtccgcgttgcaggtgggcatgctgacgggaaagtgtgtgtgtttcgttttcagagaaagataaaagccagcaggggaagaatgaggacgtgggcgccgaggacccgtctaagaagaagcggcaaaggcggcagcggactcactttaccagccagcagctccaggagctggaggccactttccagaggaaccgctacccggacatgtccacacgcgaagaaatcgctgtgtggaccaaccttacggaagcccgagtccgggtaggagccagcacggagtctgggagggatggggggaggatgttgtggaggtacaggccaagtagaccaggagagaatgtggaaggcagcgccgcctgggagggcgccggtggggcgcagctttgcaaaggcagaaggcctcgcggcggcctggttgcgagattacagttccctctccgaggccgacaggactgccgccctggctcaggctcccagagcggcaccggctcactgccccgccatcccgcgatctcacgagctgggctgcatgggcaatcccctgcacaggacattgtgttcctggcttgcagttgccagagcagagctaataaaatccctaccaggccaagagccgcgaacaggctccaacctgtgagcctttaacaaggaaaacccgccagagacacggaagagttggccctccctgggaaacctttgtcccggccctggcccagctttttccctcctgggctcgcgcttcttacaccttctttacggttgtttcggccattcaggtctctcccacacaccctatttcctagttttgtgatctccgggagcaaagttttaatacacaactactagtcctcttagaaggagaaagaaaaaaagaagaaagacttttctgcttggtttatttatcttctctcaggagttgaactctggaaattgaaactcacaccccctcttctaaattataatcatagttttgtaaaaagggcttaccttaactttgtagcaaatctgtactttatggattggcaaaaatgagctcaaataaataacccaatagcaacgtcctggtttatgctggtcggtggaagattccaaatttgttaggattctggaagcagaaaacagaatcaagcaaatcaagcggcatccagaggctttgctgttaaaaaaaaaaaattaagtgctctgggtagaaaaaataaagcccccggttagagcagagcaaacaaaaagaagaaaacaacgataaaaagaataaagaccaaaatgctctcccaaatcagagggaatgaagacactctctgggtggcatttgtgcaaggcatgaggctatgctggtggataaaaggccgggaagaagttgaaaatggttttagtttaactgtccagagccagagctgggtcctgggcggcgtggttttgagcaaggtcagtctttcattagctctcttgcacatcaagggaacgggcctctcacgtactcttctcgcctgagcaaagtttagatggcctagggtagaaatggcaagtaattaaagacagagtctatgggttttctgggatccttcgaaaacgccctcccaccccgcccgctattccgcagctccaccctagtgctttgtagccgcggcgctgggctctccttgcagctgcctctccttccagggcggctgcttgtcgagccaagtgggagtgaggcgtgctttttatagcagtcgggtgcaaagaggaagggggataaaaaggaaatcaagaatgaaaggaaaaagagaaaaagcggattacacggctgggcccggcggagatgtgtaatgtgaaacatcactggtgtcagctcggatatctcaggccaggcctctctccaatacacaaaagccgccgtctggggcgacagggaggcccgatgtggattgggatcggggttgcggctgggccaccggacacgggtggaagccggccggcctgggtggccgcctgcaaagccaaacgacccggctgggcctggcgcgcggacaggcctgtggtgggcttagggtaaagaagaggcagagcgaaagaagggggaatctccaaaactaccctttccgggttcccggagtttaatatgccaagctcctggagttaacgagctgacgaagaggtggtcttttgctctttatttggttgttttgctaggcgagaaagagtgttggcggcctagtccctgttaagggagcacgtaccagggggtgggggacgacagtggaggtcagggaaggaagggaggaattgcgtgggagaaagagcgatcctctagtgcccttccagccccttctcctcatccgtgggtctgtggctttggaatggaagcaagtttgcaaggtgccccgggaagggttggaaaagcctgctgccccgcgtttgttttacattaagtgtttttggacctggagaaacgcctggctgagtgatcaaaccgtccgcaggtctccatgcgttcggctgaggtttgtggcgtagctccgagtcccagctcgcaggccagagcagaccaggtctcctgcgcttggtggagacccgggccagtaactgaaagctggccctggtatcttggtgtgcagggcggtgcagtgaagcgaggccagggtgtgtgagtgcgctagcgtgtgtgtcgggggaaggcgggggttggcctccgatggaagttttagtaatctgcactgtggcatctgtttgctcccttgccccaaccgcccccaggtttggttcaagaatcgtcgggccaaatggagaaagagggagcgcaaccagcaggccgagctatgcaagaatggcttcgggccgcagttcaatgggctcatgcagccctacgacgacatgtacccaggctattcctacaacaactgggccgccaagggccttacatccgcctccctatccaccaagagcttccccttcttcaactctatgaacgtcaaccccctgtcatcacagagcatgttttccccacccaactctatctcgtccatgagcatgtcgtccagcatggtgccctcagcagtgacaggcgtcccgggctccagtctcaacagcctgaataacttgaacaacctgagtagcccgtcgctgaattccgcggtgccgacgcctgcctgtccttacgcgccgccgactcctccgtatgtttatagggacacgtgtaactcgagcctggccagcctgagactgaaagcaaagcagcactccagcttcggctacgccagcgtgcagaacccggcctccaacctgagtgcttgccagtatgcagtggaccggcccgtgtgagccgcacccacagcgccgggatcctaggaccttgccggatggggcaactccgcccttgaaagactgggaattatgctagaaggtcgtgggcactaaagaaagggagagaaagagaagctatatagagaaaaggaaaccactgaatcaaagagagagctcctttgatttcaaagggatgtcctcagtgtctgacatctttcactacaagtatttctaacagttgcaaggacacatacacaaacaaatgtttgactggatatgacattttaacattactataagcttgttattttttaagtttagcattgttaacatttaaatgactgaaaggatgtatatatatcgaaatgtcaaattaattttataaaagcagttgttagtaatatcacaacagtgtttttaaaggttaggctttaaaataaagcatgttatacagaagcgattaggatttttcgcttgcgagcaagggagtgtatatactaaatgccacactgtatgtttctaacatattattattattataaaaaatgtgtgaatatcagttttagaatagtttctctggtggatgcaatgatgtttctgaaactgctatgtacaacctaccctgtgtataacatttcgtacaatattattgttttacttttcagcaaatatgaaacaaatgtgttttatttcatgggagtaaaatatactgcatacaaattggtctggattctttctcccctcctctgtcactaacttggccaggacatctcagtcactgcttcctaaacaaaccagttccctctgcctgcctagttaaacatacaaggcagcagtccttatttaaatttggtagaaataaatgatagccattcatcagaaactaaaaagaaaaaaaaaggcattcccgggggggaaaagggctacaaaatctaattttgtctctccaatttttctttggcttaaacctagaggattccattatggctagcaaataatatgaaaaagaaaaaagaagaaagaaatttagcaagtccatcagct

SEQ ID NO: 27 - DNA, 1920 bp, Artificial Sequence
  Artificially methylated RASSF2A reverse complement at Cp[AT]
tgcagggttggggataggcacgtgagggggagaactctgagtagatagggaacctgcagccgggctgctcaagggcctctgtgtactgggggcgccaggaggtccagggatggaaaagggggaggtgagaaatggacaaagaaacttggcctccttggcattgctgtcacgtctggccggcccgccaagtcgaaggggcctgtttagcccctgtccggctcaaacccttttgggaataagctgggatgttagaaaaaacaaaatcccacaacctctgcctggggaatccaggccgctggaggtgggcttggtagggcagcgtgactgttccctgggagtggctgtcacagctccgggtgaaccgaggagcttgggccaagtctccatccctcttggagagggcagcagcaaggaggtgaggggagccagctcatcctccccaaccctgcactccccccccacctccccacccccagcccggaagaatcgctggcggcgggagcctggacgagctggcggggaaggggacgcagccacagcattgtctgggagggaggggagaagctccgcccctagaggggaggggagaagaggagggggcaggagacaaggggaggaagaaaggcgaaggcaaggcgaaggggtggagagtgatatgaagagcgagagaaaagagaggacagcggacgagcagatccggtaggggctgaaaaaggccaaggggctggagggagggagaggaaggaggaggggagcgaggagggcggggcgcccggtccccagtcgcgcggccaccgcctgcccagcctggctggatttgagcccggcccgccgatcgctggccgaggcgcagctgaagcagccccccagccgcggcgcccccactttccaactccacggttcctgcggcgcgggcgcgatgcagctggcccggggtgaaggcaaggcgcggggcgcggggcgcggggcactgggagcgaggcactggcgcgggatgcccggcgcaaggtgcagggcgcgggccgctctctttccgcgtccccccacctcgccaaagtttttccacgatggtccctaccccggctgggtcagccccgtaatcctcgcctgtctcttgtctcctctttcctccccgagccgcggggctcccggggcgcgcggacccccgccaggggccgtgtaggcgcggagccccagccggcctgccttgggtccgaagaaagttgtggcttggagctagtcctccttctacgacccctgggggcgtccttccttctttttgagcccgcgatgggaaggcgctcccaccccatccccggggtctctgagacttcctggcgaggtggggcggcgcggcaggtgcagggctggggagggcctgacagccctggagagtgcccgaccccagtccgccgccgtcttctaggcggattccccagaggcaggtcccagtccccggcgcggggaggcggcgcgcttcagaggggcgcagggtgcgcgggggccgttggccctccgggcacttcccctttgcggtctccccgccctccttcggagctggtgcctgaggtcgctgggacctcagcctggcgtcttctctcgccccgagcgaggcaggtgccgtgggcggccccggctacttctgcatttcgagcgcttactttgcattcagctctaagtcggagagctctggggacagccgagagtgccagtggcctcatagggagactgagggttctgtttcacctcgggcgccgtgtgggtctgggctgtccacagcacctctgcgcctcagtgataggagaagccaagcgcgaggcctctcaacagctgcgtgcactctatttcccaggtatctggaatcccggcgcctagaacgtgtttttcgggagagcaaaggctgtgtctacggcagcctgg

SEQ ID NO: 28 - DNA, 5473 bp, Artificial Sequence
  Artificially methylated SHOX2 reverse complement at Cp[AT]
ccccacctcctgtcccattgatgtgttattattgggggggctggagcagtaaaaaaagaagaaggaaaaaaagagcggggctctgctggcagaggttgagcgccgggctgacgtgcggcggcgatggaagaacttacggcgttcgtctccaagtcttttgaccagaaagtgaaggagaagaaggaggcgatcacgtaccgggaggtgctggagagcgggccgctgcgcggggccaaggagccgaccggctgcaccgaggcgggccgcgacgaccgcagcagcccggcagtccgggcggccggcggaggcggcggcggaggaggcggaggcggcggcggaggaggcggaggaggtgtaggaggaggaggagcaggcggaggagctggaggagggcgctctcccgtccgggagctggacatgggcgccgccgagagaagcagggagccgggcagcccgcgactgacggagggtaacgacctgactgacccccggcagcggttccccttcccgccttccggactcctctcgggcgggagaggactccgaggcccagcggggaggggagagggacacggagagggccctggaccccagctttgtcagctagagtgatagtggaagggtgggggtccggtggtatgctcggtcatgggtggggtcctagtgtgttgtgggggtggcgtggggggaagcgtgtggggtttgtgcgcgcccttcccagatgttcccattccaccgaaatgcatttttcaccagcgggaggatgggcccgcagcccggatggcccgcaggcggacgtggaagttcgcggggccgggctgcaggagggggtgctgaaccagacggcgggactaaagctagcctctagcgcagagtttgccgggagggagaaggggcagaggtggaaagcttaaccctccggtcgcctaggtgtttggggccgccaagacccctcgaactccgcagagcccctgaatctttggatcttaggggccaaaacttcccattctctttcaaggtagaaggaagccaacgaaagctgaggtccaggctacgctgcttctcccgggcgaggcgtttcggtttcttggtgtgttgggggcggggggggggggcggcgggggaggtggggatctatatttacacaattcctttagtgttttcaatcacccagtactcggttctcttagagcaaaaatcctttggtgctagctcagtgttaggaaacgtctttatctcaatggcagagcgttctataccaattcaaaggagttcaacaataaaattgatttggcacttggtgcctgcagtaactggtgtactgccatatttttccaattaagaaaatatgtggcatgcgtggaatcacatatttaagcaagcaattaagttgtttatgacacggtctgttcctgtttagatcagtaattggaaatttggggacaaaaatagagattttattaagtctatggatcaacttgaaatttggacatctcctcgaagccccaaaactttgagtggcatccactgtgtagatgacatgtaatagacaaagccttcccacctcattggcagaatttgaagggtgtgttttcatatttaaatttcaatacaatatcagtaaaaatactttgctattaaattggcccataatgtttactataatgttccttcctaaagaaaggacaaatgtccacaaaactaactctgagaactagaaaatacggcaatatttaagatcaccgtagctagaatgcccggcagggccgagatctagcgactcttcttcctccaaaccagcaccaggtcttcctaaatttgtaaagtggtggagttaccgtcaaggtgcccagtgcagcctcccggccatgagtccacaactacaggcccgaactacaggttcgccagcgcgcctgacggcgaggttcaggtctgaacccccggcgggcgcagttcctgggattgttgatttccaagctcagggcaagtattaatttctctgcagaccggctcttccggaaatgatttttaacacccatgctggcctggatcctgcgctgggaagaactgcaaacagcctcgactatctaaactcagctttgacttcttaaaacccggagtctctgattcgggcgcagaggataaaggttccagggggatatatatatggtggctgtatatgctcacactagaagagctcctgtttttaaagggaggagaaggacaggaaagtggcaacggatgtgtgcaaacccagagcagaaaaattcatattttattaaacatccgagctgctggttgcatgaaaaggctttgagcaaccaatagaaaccgaggatcgcgaatattccgcttgaacctgttgatctctgtgggttaagcgtttagggtcgagtctgcgtttccacgagggagggcgaagagagaacagaaagagcggttgctttcgcccgccaccggaggctggttttccgcctcctgccttctggcccggcttgggcggcgagccctttgggcagccaacatggcgtgggcgcctgtgctcgtgcgaccccggtcgggcaggcgggacggagattacctggctgtccaggggaccttatgcagggtttggcccgagcccaggggcagcgaggggcgtctgcggatgcggctccctgtgcggcacaacaccggggtctgttgctctcgctgatacctttcggcccaattgttcctaaattagaccagcaagtttgcggtaggcagagagccagcggtggtgagagctggcctgagaacgagccagccttctgggaatggccggtgtgagaggccagtgggtggccttgccgcgcccttatgtccagactttgctctgtgagaggcctggcgctgcgcctttgatttctgtgagtgctgcggagcaagtgagtgcgaaagtgagtggaaaccatttggtgtttgctggggaaggccggtgactggggggtgaatagtgaggcggtgagtcgaggtacgtttgtgaaggaggtggtggatgactgcccaccttgccccaggcggccgctcagacttgacctttgcgcttctccgggatattcttcctccgggtgggttgagaagccggaccaggattccacgagggggaaggattctctattcttttttgcgacaaatctggtaacaggatttgctgtgctgttttcgtccgtgtgtgtgtgcgtgtgtgtgtgtgttcgtgtggatgcacgtgtggccccgctggggtgccccctccagtgtccccggagctgaaagatcgcaaagaggatgcgaaagggatggaggacgaaggccagaccaaaatcaagcagaggcgaagtcggaccaatttcaccctggaacaactcaatgagctggagaggctttttgacgagacccactatcccgacgccttcatgcgagaggaactgagccagcgactgggcctgtcggaggcccgagtgcaggtacccagctgccaggaggtcgagggcccagggagcagagagagcctggggttggaaagaggcttgggggacacactcgggaggtggtgcttctagtgtctggtgtaagatgagaaggaaagagatatctttactagaggtcttattttccaaagtagatcttagtcctatagcactcccctccttttttttttttccatcctaacatatgttcccagaagaagaaagctgtgctgggctttctcccagagtttctataaaccacaccccccttgcctcgcactggctttaatgtggtttaatcctaatgggcctacttttataaggcttaaaaaaaaatcccacagaaaacgttttatctctggatgccttaaaagttccaaagagtattttgttctctggagttggatttccttgaaagtctgctctgcagggtctaggtttgtcaagcggatatcccaattaggtttatagatgtgcagactataaagaaaattagtaactgttaagtgcagaaatttacagtctgctgttagcggtcgatctcaaactgtgtgtgaaatagcggagaaataaacgcattttggtcactctttgttcattcatttaaccaaggcaacgaaactgaccctaaatacattagattttaaaacaaaccacatatattagtatttatatttccaaagcctgccctccagcacgtgccatacccaatgaagttaggactgaaacagattttctttattggttgtggaggcaaatgtaatagcaaaaataggctttgggggcatttaaaggagcaaattgtgtacattcacatacacatatccttctagctttagggggaacaaatttaaatgtttcagattgtatttccgctcagataataaaatagaataaaatgatagttattattggtttgaacacatggagcagttttaggcccgcacatctgcagctgttacaaagtatcgctgtaacagatactctttcggtctctgggcacagagaccaccatctgtagcgaactatgcacaattcttaaggggcttccccacatcttgtaacaggatcaggaaaaaaaaaaacagagcagtcacgttgaagaggaaaagtaataataggctgccttggtcatcacagcatcagcagcagagccttcctttttaagcctctcctgcttcgctctgtgcactgagatctccagaggctcagcaaccccttaaaaacatgatgataattattacagttatgattattagtatcttaattccaactcttctaggggaaaaaaaggcaagaagcctcaggccatgtgaattacacaaaggatgccaccctggcacaaaatccaccctctgttgtactaaatagcagagaaatttttgaagatttacattgactatgacacttgctttcaaaaacataccaatgaaagctctgaagcagtatttttactttaatggggttttaaaaactttaatttgtgagtcaatcaatatgctttattattgaaagtggaatacaaaagcaagctttatttgaattttaaaaaatctgtcatactgcctgtaaaagttgtcaagtttaagcaggtaacatccaggagaacaaagtacctaagagttacttgctttatatatacttcattctcctttcgctgagtgctcttctttttttctcttaagaagtgaactttattgttgtttcatacttttatttacattttagttattttctagatgttttcctactatcctaactgcaaacagtggctttttctaaagaagcaaattagattatcatgataatggtgcacaattattctgctactgtgtttcactctgctgcacagcagaacagagaaattctaaacttctttgtagtgaggcttttatgacactaattacctctccccaacccttacaactccttctccgcaaaggagtcattatttgctctggtgtttggtttttctttaagatgaagctaattaacattac

SEQ ID NO: 29 - DNA, 1405 bp, Artificial Sequence; identical to SEQ ID NO: 22
  Artificially methylated Septin9 A reverse complement at ggcC, agCt, Ccgg

SEQ ID NO: 30 - DNA, 2365 bp, Artificial Sequence; identical to SEQ ID NO: 23
  Artificially methylated Q9HC74 reverse strand at ggcC, agCt, Ccgg

SEQ ID NO: 31 - DNA, 4261 bp, Artificial Sequence; identical to SEQ ID NO: 24
  Artificially methylated GSTPi reverse complement at ggcC, agCt, Ccgg

SEQ ID NO: 32 - DNA, 6343 bp, Artificial Sequence; identical to SEQ ID NO: 25
  Artificially methylated PITX2A reverse complement at ggcC, agCt, Ccgg

SEQ ID NO: 33 - DNA, 9001 bp, Artificial Sequence; identical to SEQ ID NO: 26
  Artificially methylated PITX2 B reverse complement at ggcC, agCt, Ccgg

SEQ ID NO: 34 - DNA, 1920 bp, Artificial Sequence; identical to SEQ ID NO: 27
  Artificially methylated RASSF2A reverse complement at ggcC, agCt, Ccgg

SEQ ID NO: 35 - DNA, 5473 bp, Artificial Sequence; identical to SEQ ID NO: 28
  Artificially methylated SHOX2 reverse complement at ggcC, agCt, Ccgg

SEQ ID NO: 36 - DNA, 1405 bp, Artificial Sequence
  Bisulfite treated Septin9 A after artificially methylated at Cp[AT]
tgttatttgagttgtaaagggtggctttctgtgtctgttttgctgcattgatacattgagctgtgcatggtgttcagtgcagggagaacaaatgatcatctgttcaatgtgttcatttacaggtgaggaaactaaggcttcaactcaattgatgcactctgttcttttgattatcagaaaagtagcaggacaggtgttctgttttgttctattttggttcactaagttggcattttggctttgatttttggctgtgtttggtgttgttgtggtgtttggtgttgttgtcttgtttggtggggttgtttggagtgtttgcatctttgtttgctttcatctggttgggtttgttttgtttggacttgggactgggaagtgtggtgacttttggaatcagtcattggtgtcagtgtggggagctgggggtgcagagctgtgggtgtggtgggtcatgcaggtggttttcatttttggtctggtctggtctggtctggtctgtgctgttgtgtgggggtgttttctttcaggtttggtgtttgtcagttttgctttgtcaggtgcagtgcagtgcaggggtgggtgggggtggggcttggtgtgcatgttcatggggtggggagggggtgggtcaggggtgggatcacagttggctgggttggggttctatgtgcatctttggggaggggtggggtgggggtggggttggggtggggtttggttggtgcacttcagatggtgggttgttttctctttttgtctttctactattggttcaggattagtgttctgggagtgtgtgttttgctgtcttgttgtcacacttttctgggagtggtggtcatggaggcatcatgaagaagtcttactcaggtgggctttgtgtttggggtggggaggggttggtgttttgggatcagtgctgctcatctgagtgtctgtggttgggagtggtgaggtgtttttggagctgagtgagtttttgtggtgggcacactgcaggttgagtttctttcaggacagggttgctgttgggttgcttttgatctgagttgattgttttctgtgctgtcttcagttcttgcttgagtgttggaggggctgttctgggggatgctttctctttcttgtttcttgcattcttgcaggaattgctgacttttcaggttggttgggtgctttgggtttctgtgtgtctgtgtgggtgaatggggttggggctaggtggaggggtgttcttgggttcagtctctagggctggtggttcaggttgcagcattctttctttggattctctttggtttcttctctacttagtggggcatgggatggtcttcagatgggattgttcagcagtgttcaaacttggtgacttgggttcatgttttgtgctcaggatgttgtttgt

SEQ ID NO: 37 - DNA, 2365 bp, Artificial Sequence
  Bisulfite treated of artificially treated Q9HC74 at Cp[AT]
gtggttgtggtgggggtgttagctgcaggggtgttcttggtgggtgggagttggtggtctcttgctggtgtcatgggacttgcatgtttgttctgtgtttcttggctcttgagttcacaggttgggattctgtctgtcagttgtgtgtgctgttgtttaattcttgcaggtgcagagtgtgtggtggtggtgacagagaactttgtttggctgttcaaatacagtcttctgcagaaggattctgtgtttggggaaggggaggaatctctttttctctgggtgtttgttcttcttgtcatggtttggtcttcacatttgttcacatctggttgcagtggggtgtttggggggaggggctgaggttgtgtctcttgttgttttctgggtgtgggtcaggtggggaggaggggggtgctttggttgtgtgttcaggactgtttttcagtggtcacttgggtttcagtttttcaggtctggtcttgacaggtgggtggagcagtcagtgtgagacagggaggttggtgtgggtgtgggaatctgatttgtttgggaggtgggggtggggtgggggtgcagtgtgtggggaggggttggtgtttgtctttctttttcattcattcagctgagtcagggggtctaggggcttctttggtggctagctctgcactgcaggagtgtgggtgtggtgtttcagtcagtgtgcagggtttgggttttgttgggggtgctttcttgttgctgttctttgtgtgatttgctgttcatcagtcatcatgttggattttgtggtcaatgtgcagctggatgggatcattttggactttgaaggtgggtgctgggctggctgctgtggttgtggatgtgctggagaggattctgtgggtgggtctggtgtgggatgggggtgtgctgaggggagatgggagtgtgctgaggggagatgggatttctaattcaggtgttcttttgctgagagtgttgtgtgtttttggttttgtgtttgtgttgtctatgtgggggattctgttaggggcatttgtgtagattctgtgtgttctcacaggattctgtgcttgttctgtgcactgttgtctgggttttctttcttttattgttgtttgtgtttgtcaagtgacagtgatcttcttgagggcttgtgaggctgtcttggaactcttcaggatgcacagtttcactctgggaaattcattggttttctttctttggctctttttggtggctcttgggttttgcttggatttggcaatgggatagggaggttgtttctcatctttgactgagtggacagttgtgttctgcttgggtggacagttcttttctttttcatgtcagttttggggttgtcaagttgtgcagtttgtgggttgggagcattgaatggacacagttcaggttgtggcagggtctagagtgggatgtttcatggttttcattcaggtctggggatattctcatttgtctttcagaattgggttgtgggggacagaaggggtctgtgtgtgggcagggagagtattttggctctcttctgtctttggggtttacaaagtgtgttgggacttgtggggctgctctgttcaagtctgggtctggtgtttgtgtctctgagtctgtgagtgtgtgtgcttttctgtgttctcttgactgttggtgctggggctctgtgttctgtgtttgtgggagtaaatacagcaggtgaaggggaagctcacacaatggtcttcagtgctctggggcagggcttctgaggggtgggtctgtctctgttgggatctggagtttttgtttcttggagaggcttctaggctgacttgggcagagttctctggtgggttgggagggggaaaggctgtgttgaaatgagcaaactgttcaggtgtcaggtcaagctgggaggtgatcagtctgaggttctttttgcttcatggtcagaatcagggctgacatctgggtgttctgagttcagctgttcacatggttcatctggggtcagttctatctgagtgggggaggtggggtcttctgggggatcagaactttggctggatgtcaagcagagtgtcagtggctgttcttcagggctgggtctgaggagggtgtggggtggtgaagggatgggagggggttgtgattcagtggtcactggtgctgtgcagagtgtgagctggaaacattgtagttactttgtcagcttagtggtgaaagttctttttcaggctctatttctttgcatttctgcttttcagagggaggggaggtctgggtctgcagagctgggagggcttgctgtttttgtttttctttttcacaacatcttctcatctggacatctttgggcacatgt

SEQ ID NO: 38 - DNA, 4261 bp, Artificial Sequence
  Bisulfite treated GSTPi after artificially methylated at Cp[AT]
aacaagagatcaatatctagaataaatggagatctgcaaatcaacagaaagtaggcagcaaagtcaaagaaaatagtctaaggcacagtcactaaaaggaatgtgatcatgttctttgcagggacatgggtggagctggaagttgttagtctcagcaaactcacacaggaacagaaaatcagtgagattgcatggtctcacttataagtgggagctgaacaatgagaacacatggtcacatggtggtgatcaacacacactggtgtctgttgagtggggtgctggggagggagagtatcaggaagaatagctaagggatactgggcttaatatctgggtgatgggatgatctgtacagcaaatcatcatggtgcacacatctatgtaacaaatctgcacattctgcacatgtatttcagaacttcaaataaaagttggatggtcaggtgtggtggctcatgtctgtaatttcagcactttgggaagttgaggtgtgcagatcatctaaggtcaggagtttgagatcagtttggtcaacatggtgaaattttgtctctactaaaaatacaaaaatcagtcagatgtggcatgcatctataatttcatctacttgggaggctgaagcagaattgcttgaatttgagaggtggaggttgcagtgagttgttgagattgtgtcactgcacttcagtctgggtcacagtgtgagactatgtcataaaataaaataaaataacacaaaataaaataaaataaaataaaataaaataaaataataaaataaaataaaataaaataaaataaaataaaataaagcaattttcttttctctaagtggtcttcatttctcttttctgttctgtgaagtgggtgtgcaagctttgggattgcagtggtcttagggaatttttttttgtgatgttttggtgtgtcagtttgctgtgcacactttgctgtggttctctttctgctgtctgtttactttctaggttttgctggggatctgggaaagagggaaaggcttttttggtcagctgtgtggtgactttggggacttcagggtgtttctctgtggttgatgtttggggtgcagtggttgttggggctggggttggtgggagtttgtgggattcttcagaagagtggttggtgttgtgactcagcactggggtggagtggggtgggatcattcttataaggcttggaggttgtgaggtctttgctggagttttgttgttgcagtctttgtcatcagtgagtatgtgtggtttgctttttggggatggggctcagagctttcagcatggggtcaatttgcagcatcaggtttgggcttttggcagggcttcttgttcatcttgagatttgggatgggggtctaggggattcaggatgttttcagtgttgttagtggctttcagggggtttggagtgtcttggggagggatgggattttgggggtggggagggggggcaggctgtgctcattgtgtcttggcattcttttttgggcttcagcaaacttttctttgtttgctgcagtgttgttctacattgtggtctatttttcagtttgaggtaggagcatgtgtctggcagggaagggaggcaggggctggggctgcagttcacagtttcttgttcatttggagagatttgaattttcttatttctttgttgtgtggcttttattttgggtcttctttctgttttttgtctcttttgtcatgtctgctttttgtttcagtgttgtgtgaaatctttggaggaatctgtttatctgttttctttctgcacttctgatttctttttgggttgctgtgaggtggagttggtttggttttcacatcttgtacttctttctttttgcaggttgctgtgtggttctgtgcatgctgctggcagatcagggtcagagctggaaggaggaggtggtgattgtggagatgtggcaggagggctcactcaaagtcttctgtgtaagtgatcatgtttgggcaaggggagggggtgctgggtcttagggggctgtgactaggattgggggatgttcaagctcagtgtttctttctgagtcatgtctttttcaacagctatatgggcagcttttcaagtttcaggatggagatctcattctgtatcagttcaatatcattctgtgtcatctgggttgcattcttggtgagtcttgaatcttcaagttcagggcaggcatgggcaagtctctgtttttggagttcttttgtttaaatcagctgttttgcagttctctggagtggaggaaactgagattcactgaggttatgtagtttgttcaaggtcaagtctgggtgtctgcaattcttgttctgtgtcaggctgtctttcaggtgtcaggtgagctctgagcatctgctgtgtggcagtctctcattctttcatgcacattctctttttcttctttcaggctggggctcacagacagttttctggttggttcattttcagtgactgtgtgttgatcaggtgttcagtcatgtggtctgcttttcttcattcaatttcagggctctatgggaaggatcagcaggaggcagttctggtggacatggtgaatgatggtgtggaggatctttgctgcaaatacatctttctcatctacatcaactatgtgagcatctgcatcagggttgggcactgggggctgaacaaagaaaggggcttcttgtgttctcatttttcttatttctcaggtggcttgggctgatttcttcttgggtcagggtgcaggggctgggtcagctctgggtcaggggttcaggggtctgggacaagacacaatctgcattcttattgtctgggacatcaatcagtcaagtaatgggtcatgggggtgagtgcaaggacagagatcttcagcaactggtggtttctgatcttctggggtggtgagggctttctggagtagtcagaggtggaggaggatttgttgtcagtttctggatggaggtgctggcacttttagctgaggaaaatatgcagacacagagcacatttggggatctgggatcagttcagcagaggcagtgtgtgtgtgtgtgtgtgtgtgtgtgtgtgtgtgtgtgtgtgtatgcttgcatttgtgttgggtgggtaaggagatagagatgggtgggcagtaggttcaggttttgaaggtcttgaattcactggtttggagtcttctaagggcaatgggggtcattgagaagtctgaacagggctgtgtctgaatgtgaggtctagaaggattcttcagagaagtcagctctaaagcttttgcaatcatctggtgagagaattcagcaaggatggacaggcagaatggaatagagatgagttggcagctgaagtggacaggatttggtactagtctggttgtggggagcaagcagaggagaatctgggactctggtgtctggtctggggcagatgggggtgtctcaggggctgggagggatgagagtaggatgatacatggtggtgtctggcaggaggtgggcaaggatgactatgtgaaggcactgtttgggcaactgaagtcttttgagattctgctgtttcagaatcagggaggcaagatcttcattgtgggagatcaggtgagcatctggtttcatgctgtttctttcttgtcattctctgctttcagatggacacaggtgtgagtcatttgtttagcaaagcagagcagatctaggggatgggcttaggttctctgttttcaatttcttcagtctgcttttgctggctgagtttctagtttttctgttctgcagatcttctttgctgactacaatctgctggacttgctgctgattcatgaggttctagtttctggctgtctggatgtgttttttctgctctcagcatatgtggggtgtctcagtgtttggttcaagctcaaggtctttctggtcttttctgagtatgtgaatcttttcatcaatggcaatgggaaacagtgagggttggggggactctgagtgggaggcagagtttgtctttctttcttcaggatcaataaaatttctaagagagctactatgagcactgtgttttctgggatggggcttaggggttctcagtcttgaggttggtgggagggcagagcagaggactagaaaacagcttcttcagcacagtcagtggctttctggagttctcagtctggctgtgtttactgaatctcacaaactagaagaggaagaaaaaaaaagagagagagaaacaaagagaaata

SEQ ID NO: 39 - DNA, 6343 bp, Artificial Sequence
  Bisulfite treated PITX2 A after artificially methylated at Cp[AT]
gattgtctattcttgtcatcagctgaaggcaaggttgttctgctatgagtgtctcttaatctctacaaaatgaaaagaaaaaaagggaggattattagttcattactcagaggaatggggaggctgcaaaaattgttgatgggcagaggtgaagatgtctttcttggactgcactttttggtgttctgtaactagagttcagttgtgggacttgttgaagaaatttgattttcttgtcttggtgagatttcaaaaatcagaaatagaaattctcagagtcagagaggaaatacaattaaacagcatgtgggcattttttttctcatttctcttttcttaaataacactgctttgagttttcactgggtaaagagagaaagtttgagttttcatggatgttatgtggaggttagaaatggcttaaaatgtagatctctaatcagttttctttgtggctgaagaggctaattcttttcataaaatgagttcatctgttgactgttagctatttcaaagtgaagggatttagcactcaaaacaaattgagcaagtttgtttgtctgtttttactgctaactcaaatgaattcaaaacatggagtaattcaagaaaacacataacatgtttcagacagttttcaaaagtagggaaagttcagcatctatatagtgactagggttagttttaagtgtcaagcttttttaaatgtatctattttatgcacattcttttgagtcactatatatttctaaaattgtgagtattggtatattgatttaggaagagcaatacaacttttagagggaactttattctcaattagggatcaaagagatgtctttttaatagtgggtctgagttttgctctcaagcaggaattaatattggtgggaaaatttgaattcaggagcaatggctgtgttttggcacttttcaaaaacatacattaacaggatgttcttgagattgaaaaaacattgtttcatatgtctggcagaagtcttcacatctggttcttcaggtgaattatatttatagttctttcactcagaggcaggacagagtcaaaatattctgctcactatcaaaatacacatctttgctcaagtcaagaaatcagaaaatcagggttcagaagtaaggcacactttttgagtgagaatatgttctgtaatttcacatactctttgctttgcaggagcaaatgtggacttgagggaaactctctttttcattttcacttctattttgtgcaatttaatatcattcttgtcaggaatcttaatcttgtcattttaaaaaatgagatatttgtgattcagggtgaacttgttgaatgtaggtacagcagaggaaattctagactctatgagtgtctgagtcttgttcagtgcaaattctttgtgaacactgggtcagtgtgtggttgtgttcatctgtgtgttgacactctcagcatgtctggttcatttgtcttgatcttgggtgtggtgtttcagctaagctgggttcagtgttttggtctttttcagctgacaagtctagcttgtttgcttttggctgtggttctttcattctctttcactagctcacttcattcttctagatttctcttcactcattctctttcattttcattgtgttcatcttcacttttgttctctattggtctctcacttttctttctttgcagtttctctttgctgtgatctcttttctcaactctgcaggtctgaaagaaggtcacacatgcatgctcacattcacacttcacatgtcttgtttcaaacaatttcatgaacattgttctttgttttgtctcttgggtcactttttctgttgctttctttcagtttgttctgatttgcttttcaaaagtatgtttctgtctttttgctgttctggtgctttttctttgatttattagggctgttgggttggtgcagattgctttttcttctctttcatttcattctttcttctggttcttcttttcacagtgggagtttgtgcttctgcttcttggttggcttctaagtgttttgtcaggttttctcttcttttgctcttttggctttggcttttgactctttggtttgctggcatctgcttttcttttctgtcttgtttcttgttgtttctgcttgctttttttggtgcttgtttgggtgctgtgcttgcttctggattgtcagttgtgcagtgggcttgttggtgtttgtgtgtcactgtgcagtggagtttggtggaatctctgctgatgtcatgtcacttttcacatggagtaggagcagagggaagagagagggatgagagggagggagaggagagagagtgtgagattgagtgagaaagctggagaggagcagaaagaaactgtcagtggtggctagattttggaggtttcagtgcatttgtggacttctttggaacttggcattctcaggagttctgcagttctctcaggtttggcttttgggtgcttgttgtgcagttggaggcttggcttgctggaaattgttttgggaagcagtgggatgtggagacagcagctctcttttggtagttggtaagtggaggtcatctattttgcagggatgtgagataatgtgagtctggaaatttgtttcactttggagaatcttcattgtaggtgatttgtggcttttggggctaagttttgttcaaggtaatgcagttggcaaacagatcttgcaaagttctgtttcttttgttttttgtcacagacactaacaatctacagggtgctgaagttgagagggaagtcagattgtggctggcatttaaaatgaggtatcttttcttaaatcttggtgtcaacactgcaggaacaaattcttgggtcaaggattagcattctcaagataaagggctgggtacaaagtttcagctactggaagattagttttcttttcattgttattcattgggaaaaaaaagaaaagaaaaagatttcatcttaactggcagttagtgatctctcaggttcaagtgaattatctgggagtcaggtctggatgtcaagctctcatcatttctttggattgtaacttctttaaattgatcatcagtcaacttcaatctggcacttcaggagatacactttaaatggatgcagagaattatttttcagctggagattaagaaaaaaatttttgattctaaatctttgaaatatgtttctctttttcagtttaatcactttactttcttaagcaatttagaaatcaaactatcataaggtggtgtgatttttttttactcttttgtgtgagtattgtcttactaaactaaatggaaaaaacttttatcattataaatgtaaatatcagaattcatacattctaaaatatttttatgaaaaattaatctgatttaaagaaattttcttgcatttgttttagtctatcaatcaaaactaaagatgcttttatcacacaaaatatcattttggcagaaattcatctaaaattcaaatatcaataatatcaagaaaacaaagcacataagcaaaataaattgaagatttttgttgatgtaacatgagcatacaacatttcaataatcaaactttttctaaaaaattaaatagtcacttcatttgtggaatgttttactttaactcagcaaaattacacttaaattatttaggtgctttgtttcttaagttaagtgtgtttgtcttcaaatgtttctaaagcacttatattaattggttgtaaagaatgcatacacatggtaaaatacagaactgaactgagcagtattttaattttcttaaataattacttactacaaattaatttactggctaatttcacaatttagttcatttaaaacacatgtttctgtgctgtttatttttaaacttttcattaaagattttgttatggggtaacaaagtgtatgaaaaggggggaaatgtgaaaggatctgggattatttgaactgtattttttctgcactttcagtcttgtggtagtcatcagaaattattttttagcaaattgttttatttcttagggcttgtctgtctgctttgtcatggtttcttgttctttgttagttgtgtagtgctttttgtgtgctcacaatataaaattcaagttggtcaaaacaagagttcttggcatatacatttcaactagaacatgaactttgggggtgagaactatctttcatcaggaaaagtctttcatctcaatttgtgagattagtcattgaagtcagttttgaagtctggcagtcaaatttctcacagaagacttgtcttgatagggcaagtttaaggatcagcaggtgggaattggaggtctctttttaaaaaattatctttttcagttatttagactcagttcttctagtaggtctggtcattaaatgaagcataaaaatgcaagtctcaaggctcattttgactgcaaaataaatcttcaagtcacaaggacatgtaggagtgagctaaggaacatgtcttgatcttcttttcagttcttagagtggagctctatgagttcttgaagatttgttttgtattgctttgtttggtcttcagcactgaagcatggggaagtggggggaagaatgtgtaataattgactgactttacatcaagcaatgcaatctttttcttttgtatatttcattctttaaaaaaaataaataaataaaaactatttgcagttatcatctgcagtgctttggctatcagctaataatgcagtcagttcagacatataaaaaaaaaagattattgaaatgatgatgacatgcaaattttctttgaaattatcataagtaaacatttgaagtctggactaataaaatttcatctgtgttacttcatattgagttagtagaaagctgtgataatgaattttgtaatatctcatgaacagacatctcaatcagggactaattctgtgattttactgcagaatcactaaatctggagttgtcaaactgctacttctgggttcatgggttcacaaggattgaattggcagagtttttgtttgtgttcttgctagtgggtgggggaattgtctggttgttttcattctggattttcatgtcacagtgttgggcagtttcttctgtaggcagtgatcttggtcagaggcttttcagggttcagctttcttcaggagaggttgagatgcagggaaatggtactcaggtcagaggcaggtttgcagctttctgttttgtctctgtgtctttgtcaatttgacaatgcttgctttcattttgatttttgcatttgtgtgaagtgggttctttggttgttggtgtattctggttagtgtggagagaggcaggtgctgagattgaaggggtctagggagttctggatcttcttttcttgtctttaaagcaattgtggctcttctattcatttggtggagtttcttgagattcatctcttttggcttgtctgtggcagagaagggggagtgtgttaaatgcttggcttgctgtgttgtggttgaaaatgtgaaaaagatttggcttgtttgggagagaaagggggagaactgggtagcagttatatcagagctatttctttgttcttggtgggcagtaaattcttcaagaatgtttgttctgctcttctcagtcttgctcagttcattcagtgtctcttctctgtgatcttaaatcatactttagggtaattatttgtagtaagtaaataaatggttgggttagtatctctaggagaaagtgtggctaaatatggaaaagtggcttctgatggatgagaggtttgaactcagcttgcttctgaaacattctaggtcaagagtttgtttgtttcagaattacagaaaattgagggaaactgctgtctaggacaggggcatgttggtgctgatgttctacaaatgtttattgagcttcaactaatggacaagcactgaagggtggtctttgcatacagcttttcaaagagaaaagttctcttcattcattcacttttgctgtcattgtgttcagatgagttcttaattttggcattgagattcttgaaagtaggttcacagtcttttcagcacactgtggctttatagttctctaatctctgggcacttttgtggcaactctggagggagattttctcttgataaataaatgttctgggtttgaggctaggctggagatgctgctgcacatgtcagaggctgtcaggttggaaaaacatgtctgaagtctagcacacagtaggtgtctaacagctagtgtaatgtagtctcatctgagttctgctcacttgatggttgttgcttcttacagtctttcttctcttctgttttgcaga

SEQ ID NO: 40 - DNA, 9001 bp, Artificial Sequence
  Bisulfite treated PITX2 B after artificially methylated at Cp[AT]
agctgatggacttgctaaatttctttcttcttttttctttttcatattatttgctagtcataatggaattctctaggtttaagtcaaagaaaaattggagagacaaaattagattttgtagttctttttttttttgggaatgtctttttttttctttttagtttctgatgaatggctatcatttatttctatcaaatttaaataaggactgctgtcttgtatgtttaactaggcaggcagagggaactggtttgtttaggaagcagtgactgagatgttctggtcaagttagtgacagaggaggggagaaagaattcagatcaatttgtatgcagtatattttactttcatgaaataaaacacatttgtttcatatttgctgaaaagtaaaacaataatattgtatgaaatgttatacacagggtaggttgtacatagcagtttcagaaacatcattgcattcatcagagaaactattctaaaactgatattcacacattttttataataataataatatgttagaaacatacagtgtggcatttagtatatacactttcttgcttgcaagtgaaaaattctaattgcttctgtataacatgctttattttaaagtctaatctttaaaaacactgttgtgatattactaacaactgcttttataaaattaatttgacattttgatatatatacattctttcagtcatttaaatgttaacaatgctaaacttaaaaaataacaagcttatagtaatgttaaaatgtcatattcagtcaaacatttgtttgtgtatgtgttcttgcaactgttagaaatacttgtagtgaaagatgtcagacactgaggacatttctttgaaatcaaaggagctctctctttgattcagtggttttcttttctctatatagcttctctttctctttctttctttagtgttcatgatcttctagcataattttcagtctttcaagggtggagttgtttcatttggcaaggttctaggattttggtgctgtgggtgtggctcacatgggttggttcactgcatactggcaagcactcaggttggaggttgggttctgcatgctggtgtagttgaagctggagtgctgctttgctttcagtctcaggctggtcaggcttgagttacatgtgtttctataaacatatggaggagttggtggtgtgtaaggacaggcaggtgttggcattgtggaattcagtgatgggctactcaggttgttcaagttattcaggctgttgagactggagtttgggatgtctgtcactgctgagggcatcatgctggatgacatgctcatggatgagatagagttgggtggggaaaacatgctctgtgatgacagggggttgatgttcatagagttgaagaaggggaagctcttggtggatagggaggtggatgtaaggttcttggtggttcagttgttgtaggaatagtctgggtacatgttgttgtagggctgcatgagttcattgaactgtggtttgaagtcattcttgcatagcttggtctgctggttgtgctttctctttcttcatttggtttgatgattcttgaatcaaatctgggggtggttggggcaagggagcaaacagatgtcacagtgcagattactaaaactttcattggaggtcaatttttgtctttttttgacacacatgctagtgcactcacacattctggtcttgcttcactgcattgttctgcacatcaagatatcagggtcagctttcagttactggtttgggtcttcatcaagtgcaggagatctggtctgctctggtctgtgagctgggacttggagctatgtcacaaatctcagttgaatgcatggagatctgtggatggtttgatcactcagtcaggtgtttcttcaggttcaaaaacacttaatgtaaaacaaatgtggggcagcaggctttttcaattctttttggggcatcttgcaaacttgctttcatttcaaagtcacagattcatggatgaggagaaggggctggaagggcactagaggattgctctttctttcatgcaatttctttctttcttttctgatcttcactgttgtttttcattttctggtatgtgctttcttaacagggactaggttgtcaacactctttcttgtctagcaaaacaatcaaataaagagcaaaagatcatctctttgtcagcttgttaacttcaggagcttggcatattaaactttgggaatttggaaagggtagttttggagattttttcttcttttgctctgtctcttctttattctaagttcatcacaggtctgtttgtgtgtcaggttcagttgggttgtttggctttgcaggtggtcattcaggttggttggctttcatttgtgtttggtggttcagttgcaattttgatttcaattcacattgggtctttctgttgtttcagatggtggcttttgtgtattggagagaggtctggtctgagatatttgagctgacatcagtgatgtttcacattacacatctttgttgggttcagttgtgtaatttgctttttctcttttttctttcattcttgattttctttttatttttctttctctttgcatttgactgctataaaaagcatgtctcactttcacttggcttgacaagcagttgttctggaaggagaggcagctgcaaggagagttcagtgttgtggctacaaagcactagggtggagctgtggaatagtgggtggggtgggagggtgtttttgaaggatttcagaaaattcatagactctgtctttaattacttgtcatttctattctaggtcatctaaactttgctcaggtgagaagagtatgtgagaggtttgttttcttgatgtgcaagagagctaatgaaagactgatcttgctcaaaatcatgttgttcaggattcagctctggctctggacagttaaactaaaatcattttcaacttctttttggtcttttattcatcagcatagtctcatgtcttgcacaaatgtcattcagagagtgtcttcattttctctgatttgggagagcattttggtctttattctttttattgttgttttcttctttttgtttgctctgctctaattgggggctttattttttctattcagagcacttaattttttttttttaacagcaaagtctctggatgttgcttgatttgcttgattctgttttctgctttcagaattctaacaaatttggaatctttcattgatcagcataaatcaggatgttgctattgggttatttatttgagctcatttttgtcaattcataaagtacagatttgctacaaagttaaggtaagttctttttacaaaactatgattataatttagaagagggggtgtgagtttcaattttcagagttcaacttctgagagaagataaataaatcaagcagaaaagtctttcttctttttttctttcttcttctaagaggactagtagttgtgtattaaaactttgcttttggagatcacaaaactaggaaatagggtgtgtgggagagatctgaatggttgaaacaattgtaaagaaggtgtaagaagtgtgagttcaggagggaaaaagctgggtcagggttgggacaaaggtttttcagggagggtcaactcttttgtgtctctggtgggtttttcttgttaaaggctcacaggttggagtctgtttgtggctcttggtctggtagggattttattagctctgctctggcaactgcaagtcaggaacacaatgttctgtgcaggggattgttcatgcagttcagcttgtgagattgtgggatggtggggcagtgagttggtgttgctctgggagtctgagtcagggtggcagttctgttggtcttggagagggaactgtaatcttgcaatcaggttgttgtgaggtcttctgtctttgcaaagctgtgtttcattggtgttctttcaggtggtgctgtctttcacattctcttctggtctacttggtctgtatcttcacaacattcttttttcatttctttcagactttgtgctggcttctatttggacttgggcttttgtaaggttggttcacacagtgatttctttgtgtgtggacatgtttgggtagtggtttctctggaaagtggtcttcagcttctggagctgctggctggtaaagtgagtttgctgttgtctttgttgcttcttcttagatgggttcttggtgttcatgttctcattctttttctgctggcttttatctttctctgaaaatgaaacacacacacttttttgtcagcatgttcatctgcaatgtggatgtcaactggattggtggcagaagttgtggaagagctgggctgtctggtgttggaggagggtgtgtgtggtggctttgggttgtgaggagtgctgtgtctgtggggtgtgcaggtgcaagtgtgggtgtttgtgtttcattttcttttctttttcagtgttgcatgttttatttacatgtttatctcactgcagtggcacattcacttttatagtctgtgctttcaagtatatttatacatctctgtgcagacacatcaaatcttctgggatgtgcacatgtgtgtggtttacagatttttctttttcttgcagaaagctcagattttcatgtggtttgggaaggctaggaaaagatgtggggatttggttgggcattgaagtttgttggttctttttcaaaaaaaaaaaaaaaatgtctctttgtgaagggcatttctgagtggtttcaggcaattttctaatgagtggagcttcttgggagctgaaagttgagaggaaaacagggacagaggttggtggtctctgaaggttcttgaatcaagatgctgggatttttgtgattcaggaaacagaagggaggtcagggtatgaatagagagggtggcagaattgcttgtgttcttagtgtttcaggagttgggttggttgagggagaactaaagggatgtggggtagtcaaaattttggcttttggaagttctgtggggagtcaggtgaatgatcactttcatcatgtctttttttggaggggctgactttcttggggtgagagggagtgggtggtgcagagcagctgagtgggaatgtctgcagggtggtgtggtgtcttatctgtggtctttgggctggaggtgttggagatggtgtgcatcttcagtctgtgcttggaggagttcagtgattggggctgattgggagtcagaattgaagtcatggctaatggctggggatggtgacaggaagatgaggagatggttgacagcttggtttttgctgcttggtgcttcaagtgaagtgggtctttcatgcagttcatggatgagggagtgtgatgctctactagttcttggctactgttttgttgagtttttgtagttgttgctgtttgctttgggttgtgctctaggtgtggagtttttttgctgtggggagagtcaggggatgcaatttttgttgagttctcaagtcaagctgtttttgtcttctttggaaggctcaagtgaaaaagtttggagatggaaagtcagtgggcaaatgaagacatgggatgtgggcagaagggcatcactcagagtgtctttagggagcaggctttcaagcttcaaagtgaaacaagagtgggcaaagattttcttcttctctttctttctttttcaagaatttcttcaataaggaaagctaatgttgattgtgctctgtttgtttttttttcatgtggcagttctgacagagaagtgtcaagagtgacagggacaggtaggtgatattagattttctgtggtggcagcagttgctgcagtcatgatgtggttctctgagtgcattctttgcaatgtgcacatgcacatttcttgggtggttgaacaggagttgggtcttgttgcagctcagcttcaggcattcaggtgagtgatggatcagatctgtggctttgtgcttttctgttggtctaacatcttaaaatcagaggtgggctttctggtgttgagatgtcactttgttgtggttcttttcagttctctttgtctttgtcttctttcagattcttctttgggtgtgactgatgtggctttgcatcaatcaggatgttttgagttgtggtggagggactgttctgtctgcatctatcagcagtgtggggttgggctactgtcttgttgtgtgcactgggtctacacaggcaagcttttgggaattcagcttctgttcagttcaaggtgatttggcttttagtatgaattcaaaggtgaagagatgaggctaggagttgaaggcttgggagaagagagtggaatggtcaagaagagaaaggtacaaggatcaacaagacattcactctttgtgtctcactacattcattttcaatttttcatttcatataaaaaggagacatgttacttaaaactagaaaatttgaaaaacagcaacaaatcatctctttgatcttaaatttttcaaacagtctgtcaagtgaatgctgtgctaatctgaagaagctttaattgcaaagaagacagagttctgaaaaggcaggctaataaattagaaattgagaagcaaatggatttgtcaaaagaaaattatcttgactttaaatgaacaactgtttggtggttcactctggatttatacaagaataaaaagttgtctcagatcatgttctctgtgatgcttattagttttcagacagaaaacacacaatagaagagaaattctaattcagtgttttcaaaatgctgaaagcttattcattctacttaatgttgattaagacacatattctagatctttcaaatttcttgtacactgtattaagcttgttctaatttgagagagtcatgctttaaatttgactctcttgtttactttattatcaatcagatttaaattcataaagtctgtagaatcaacaatcttgagctaattatatatgaaatatgtcttaatgaattttcatacaattaagaatgttgtcaaataatcaatttcaaggataatttttaacagtcattttcttttttcagtgagctcaaggctgtcttgagtcattaaagttcaagcaggcagaaggggtgtgtgtgagctaagggtgaaaagtctagaactgtgctcaactagcaaaagcaaaatcttatttatataaaacaaaaaaaatcatctttggagacatcaactctttatagcactgttttcaagcaaatttaattttcaaagaaattaaagaaagaaattcaaacatattcaaaataatttttgaaagttcttttgtttttcagcataggtcagctggagaggacaaactaatcttctctgggtttctgcatgggtgattgttttactatggagttagtgttatcatctctgaatgtgtatttgtttgacattacagtcaatgatttgcaatgtcagcatgaagtatctttaaaacactttcttcttgttcttgttcacaagattgggaaacttatttgatgtggaacaaagtggatgaagcagactacaaatatatttgcaacttatgtgtctcttctttgttctgatcattttcaaattctatctgcaacttcttttcattttaaacttgcagttcaaagatgcacatgagaattgtttttcagtctttcttcatcagtatcatttcactttaagaataatttagctgcaagggaggaatttcttcatagtaagctttaaatcagcatttctgcttttaatcttttatttcactttatttcatttcacacatacagacatctgctcagagtaaaacacattctcatgtgacaggtctgcattagctgaggctcatacattcagctatattaggttctgcaatcttatcactaaattatacacattacactagcagtctgttggtaaagaaggttaaattaatttacattctgctcattatctggtgcttaaatgatgcattttattttggagatttggtggagaatcttcttctcagatttcacagtgtttcactgaagacaatgctcttacatttgtagtggtttttaatctgataagactctaatttgcttaagtcttttaaataagggttttaaatgtttctagttgttttcttattgaattttctctaattttttcaagatcataaagtatatgtgtaaagtaaatattttctttcattgcactgtcagttgatgatctataactaagtcaataagaattcagctcttttctgctgaatgtgtttactaatcatatttcagtttcttcttttaaatctcagaatagctgtggttttcacaatatcatgtttcttaaagcttcatttcatgaagggacttcatcacattaaagaatgaaaaaaatcttcactgtagttagtatacacagtttctcacttcttgtttttcaagattcaaatttcagagctgcaaatatttttggaagcttgggtgttaatgtcttattttagaaagttgagaagtttcacagagtcatatagatttctaaattcatctctcataaattcacagaattttgataaaagctctggtggcttcactctattgatggaactttcatcatgacaaatatacatgtatgaaggatctcaatcagtcttcaaagtggttgaaaaattcaagggcatgtgactgcttctcatagtgtcaatgtgtgtgagatgttggaagcactggggatcagcagcagtctagatgtctaaaaagataaggtgttctaatttgtgtggattcattgaagtcaagtggtgaataaagacaattatctagataattcagattaaagtaaaagcaaaatcatatctatttgtatatatatattcacattcattttatattacagacacacacatgcacacacacactggctctgtaaacaactgactcaaagtgaggattttctttgcattttttcagcaggagtttcaacattcttctaatcttctaatcactttaca

SEQ ID NO: 41 - DNA, 1920 bp, Artificial Sequence
  Bisulfite treated RASSF2A after artificially methylated at Cp[AT]
tcaggctgttgtagacacagtctttgctcttttgaaaaacatgttctaggtgttgggatttcagatatctgggaaatagagtgcatgcagctgttgagaggtcttgtgcttggcttcttctatcactgaggtgcagaggtgctgtggacagttcagattcacatggtgtttgaggtgaaacagaattctcagtctttctatgaggtcactggcactcttggctgttttcagagctctttgacttagagctgaatgcaaagtaagtgcttgaaatgcagaagtagttggggttgttcatggcatctgtcttgcttggggtgagagaagatgtcaggctgaggtttcagtgatctcaggcatcagctttgaaggagggtggggagattgcaaaggggaagtgtttggagggtcaatggtttttgtgcattctgtgtttctctgaagtgtgttgtctttttgtgttggggactgggatctgtctctggggaatttgtctagaagatggtggtggactggggttgggcactcttcagggctgtcaggttcttttcagttctgcatctgttgtgttgtttcatcttgtcaggaagtctcagagattttggggatggggtgggagtgtcttttcattgtgggctcaaaaagaaggaaggatgttttcaggggttgtagaaggaggactagcttcaagtcacaactttctttggattcaaggcaggttggctggggctttgtgtctacatggtttctggtgggggtttgtgtgttttgggagttttgtggcttggggaggaaagaggagacaagagacaggtgaggattatggggctgattcagttggggtagggatcattgtggaaaaactttggtgaggtggggggatgtggaaagagagtggtttgtgttctgcatcttgtgttgggcattttgtgtcagtgtcttgctttcagtgttttgtgttttgtgttttgtgtcttgtcttcattttgggtcagctgcattgtgtttgtgttgcaggaattgtggagttggaaagtgggggtgttgtggctggggggctgcttcagctgtgtcttggtcagtgattggtgggttgggctcaaattcagtcaggctgggcaggtggtggttgtgtgactggggattgggtgttttgttcttcttgcttttcttcttctttctctttctttcttcagtttcttggtctttttcagtttctattggatctgcttgtttgctgttctctcttttctcttgctcttcatatcactcttcatttctttgtcttgtctttgtctttctttcttttcttgtcttctgttttcttctcttcttttcttttctctaggggtggagcttcttttctttctttcagacaatgctgtggctgtgttttcttttttgtcagcttgttcaggcttttgttgtcagtgattcttttgggctgggggtggggaggtggggggggagtgcagggttggggaggatgagctggcttttctcatcttcttgctgctgttctcttcaagagggatggagacttggttcaagcttcttggttcatttggagctgtgacagtcactttcagggaacagtcatgctgttctatcaagttcatcttcagtggtctggatttttcaggcagaggttgtgggattttgttttttctaacatttcagcttattttcaaaagggtttgagttggacaggggctaaacaggtttctttgacttggtgggttggtcagatgtgacagcaatgtcaaggaggtcaagtttctttgttcatttctcatctttttctttttcatttctggatcttctggtgttttcagtacacagaggttcttgagcagtttggctgcaggttttctatctactcagagttctttttctcatgtgtctattttcaattctgca

SEQ ID NO: 42 - DNA, 5473 bp, Artificial Sequence
  Bisulfite treated SHOX2 after artificially methylated at Cp[AT]
gtaatgttaattagcttcatcttaaagaaaaatcaaacatcagagcaaataatgacttctttgtggagaaggagttgtaagggttggggagaggtaattagtgtcataaaagtctcactacaaagaagtttagaatttctctgttctgctgtgcagcagagtgaaacacagtagcagaataattgtgcatcattatcatgataatctaatttgcttctttagaaaaagtcactgtttgcagttaggatagtaggaaaacatctagaaaataactaaaatgtaaataaaagtatgaaacaacaataaagttcacttcttaagagaaaaaaagaagagcactcagtgaaaggagaatgaagtatatataaagcaagtaactcttaggtactttgttcttctggatgttatctgcttaaacttgacaacttttacaggcagtatgacagattttttaaaattcaaataaagcttgcttttgtatttcactttcaataataaagcatattgattgactcacaaattaaagtttttaaaatttcattaaagtaaaaatactgcttcagagctttcattggtatgtttttgaaagcaagtgtcatagtcaatgtaaatcttcaaaaatttctctgctatttagtacaacagagggtggattttgtgtcagggtggcattctttgtgtaattcacatggtctgaggcttcttgtcttttttttttctagaagagttggaattaagatactaataatcataactgtaataattatcatcatgtttttaaggggttgctgagtctctggagatctcagtgcacagagtgaagcaggagaggcttaaaaaggaaggctctgctgctgatgctgtgatgatcaaggcagtctattattactttttctcttcaatgtgactgctctgttttttttttttctgattctgttacaagatgtggggaagtttcttaagaattgtgcatagtttgctacagatggtggtctctgtgttcagagattgaaagagtatctgttacagtgatactttgtaacagctgcagatgtgtgggtctaaaactgcttcatgtgttcaaatcaataataactatcattttattctattttattatctgagtggaaatacaatctgaaacatttaaatttgttttttctaaagctagaaggatatgtgtatgtgaatgtacacaatttgcttctttaaatgttttcaaagtctatttttgctattacatttgtcttcacaatcaataaagaaaatctgtttcagttctaacttcattgggtatggcatgtgctggagggcaggctttggaaatataaatactaatatatgtggtttgttttaaaatctaatgtatttagggtcagttttgttgtcttggttaaatgaatgaacaaagagtgatcaaaatgtgtttatttctttgctatttcacacacagtttgagattgattgctaacagcagactgtaaatttctgcacttaacagttactaattttctttatagtctgcacatctataaatctaattgggatatttgcttgacaaatctagattctgcagagcagactttcaaggaaattcaacttcagagaacaaaatactctttggaacttttaaggcattcagagataaaatgttttctgtgggatttttttttaagtcttataaaagtaggttcattaggattaaatcacattaaagtcagtgtgaggcaaggggggtgtggtttatagaaactctgggagaaagttcagcacagctttcttcttctgggaacatatgttaggatggaaaaaaaaaaaaggaggggagtgctataggactaagatctactttggaaaataagatctctagtaaagatatctcttttcttctcatcttacatcagacactagaagcatcatcttttgagtgtgtttttcaagtctcttttcaatttcaggctctctctgctttctgggttcttgatcttctggcagctgggtatctgcacttgggtctttgacaggttcagttgctggctcagtttctcttgcatgaaggtgttgggatagtgggtcttgtcaaaaagtctcttcagctcattgagttgtttcagggtgaaattggtttgactttgtctctgcttgattttggtctggtctttgttcttcatttcttttgcattctctttgtgatctttcagctttggggacactggagggggcatttcagtggggtcacatgtgcattcacatgaacacacacacacatgcacacacacatggatgaaaacagcacagcaaattctgttatcagatttgttgcaaaaaagaatagagaattcttttttcttgtggaattctggtttggcttctcaattcatttggaggaagaatattttggagaagtgcaaaggtcaagtctgagtggttgtctggggcaaggtgggcagtcattcatcatcttcttcacaaatgtatcttgactcattgtctcactattcatttttcagtcattggtctttttcagcaaacatcaaatggttttcactcacttttgcactcacttgctttgcagcactcacagaaatcaaaggtgcagtgtcaggtctctcacagagcaaagtctggacataagggtgtggcaaggtcattcactggtctctcacattggtcattttcagaaggctggcttgttctcaggtcagctctcatcattgctggctctctgtctattgcaaacttgctggtctaatttaggaacaattgggttgaaaggtatcagtgagagcaacagattttggtgttgtgttgcacagggagttgcatttgcagatgtttcttgctgtttctgggcttgggtcaaattctgcataaggttttctggacagtcaggtaatctttgttttgtctgtttgattggggttgcatgagcacaggtgttcatgtcatgttggctgttcaaagggcttgttgttcaagttgggtcagaaggcaggaggtggaaaatcagtctttggtggtgggtgaaagcaattgctctttctgttctctctttgttctttcttgtggaaatgcagacttgattctaaatgcttaattcacagagatcaacaggttcaagtggaatatttgtgattcttggtttctattggttgctcaaagtcttttcatgcaatcagcagcttggatgtttaataaaatatgaatttttctgctctgggtttgcacacatttgttgtcacttttctgttcttcttctttctttaaaaacaggagctcttctagtgtgagcatatacagtcatcatatatatatttttctggaatctttattctctgtgtttgaatcagagactttgggttttaagaagtcaaagctgagtttagatagttgaggctgtttgcagttcttttcagtgcaggattcaggtcagcatgggtgttaaaaatcatttttggaagagttggtctgcagagaaattaatacttgttctgagcttggaaatcaacaatttcaggaactgtgtttgttgggggttcagatctgaatcttgttgtcaggtgtgctggtgaatctgtagtttgggtctgtagttgtggactcatggttgggaggctgcactgggcatcttgatggtaacttcatcactttacaaatttaggaagatctggtgctggtttggaggaagaagagttgctagatcttggttctgttgggcattctagctatggtgatcttaaatattgttgtattttctagttctcagagttagttttgtggacatttgttctttctttaggaaggaacattatagtaaacattatgggtcaatttaatagcaaagtatttttactgatattgtattgaaatttaaatatgaaaacacattcttcaaattctgtcaatgaggtgggaaggctttgtctattacatgtcatctacacagtggatgtcactcaaagttttggggctttgaggagatgttcaaatttcaagttgattcatagacttaataaaatctctatttttgttttcaaattttcaattactgatctaaacaggaacagattgtgtcataaacaacttaattgcttgcttaaatatgtgatttcatgcatgtcacatattttcttaattggaaaaatatggcagtacatcagttactgcaggcatcaagtgtcaaatcaattttattgttgaacttctttgaattggtatagaatgctctgtcattgagataaagatgttttctaacactgagctagcatcaaaggatttttgctctaagagaattgagtactgggtgattgaaaacactaaaggaattgtgtaaatatagattttcatcttttttgttgttttttttttttgttttcaacacatcaagaaattgaaatgtcttgtttgggagaagcagtgtagtctggatctcagcttttgttggctttcttctatcttgaaagagaatgggaagttttggtttctaagattcaaagattcaggggctctgtggagtttgaggggtcttggtggtttcaaacatctaggtgattggagggttaagcttttcatctctgtttcttctttcttttggcaaactctgtgctagaggctagctttagttttgttgtctggttcagcattttcttctgcagtttggttttgtgaactttcatgtttgtctgtgggtcatttgggctgtgggttcattcttttgctggtgaaaaatgcattttggtggaatgggaacatctgggaagggtgtgcacaaatttcacatgctttttttcatgtcattttcacaacacactaggatttcattcatgattgagcatatcattggattttcattctttcactatcactctagctgacaaagctggggttcagggttctctttgtgtttctcttttctttttgctgggtcttggagttctcttttgtttgagaggagtttggaaggtgggaaggggaattgctgttgggggtcagtcaggttgttattctttgtcagttgtgggctgtttggctttctgcttctcttggtggtgttcatgttcagcttttggatgggagagtgttcttcttcagcttctttgtctgcttcttcttcttctacatcttctttgtcttctttgttgttgtctttgtcttctttgttgttgtctttgttggttgtttggactgttgggctgctgtggttgttgtggtttgtcttggtgcagttggttggcttcttggttttgtgcagtggtttgctcttcagcatcttttggtatgtgattgtcttcttcttcttcttcactttctggtcaaaagacttggagatgaatgttgtaagttctttcattgttgttgcatgtcagtttggtgctcaatctctgtcagcagagttttgctcttttttttcttcttctttttttactgcttcagttttttcaataataacacatcaatgggacaggaggtgggg

SEQ ID NO: 43 - DNA, 1405 bp, Artificial Sequence
  Bisulfite treated Septin9 A after artificially treated at ggcC, agCt, Ccgg
tgttatttgagttgtaaagggtggttttttgtgtttgttttgttgtattgatatattgagctgtgtatggtgtttagtgtagggagaataaatgattatttgtttaatgtgtttatttataggtgaggaaattaaggttttaatttaattgatgtattttgtttttttgattattagaaaagtagtaggataggtgttttgttttgttttattctggtctattaagctggtattctggttttgatttctggttgtgtctggtgttgttgtggtgtctggtgttgttgttttgtctggtggggtcgtctggagtgtttgtatttttgtttgtttttatttggccgggtctgttttgtctggatttgggattgggaagtgtggtgatttctggaattagttattggtgttagtgtggggagctgggggtgtagagctgtgggtgtggtgggtcatgtaggtggtctttatttctggtctggtctggtttggtttggtttgtgttgttgtgtgggggtgtttttttttaggtctggtgtttgttagttttgttttgttaggtgtagtgtagtgtaggggtgggtgggggtggggtttggtgtgtatgtttatggggtggggagggggtgggttaggggtgggattatagctggttgggccggggttttatgtgtatttctggggaggggtggggtgggggtggggccggggtggggtctggttggtgtattttagatggtgggtcgttttttttttttgtttttttattactggtctaggattagtgttttgggagtgtgtgttttgttgttttgttgttatatttttttgggagtggtggtcatggaggtattatgaagaagttttatttaggtgggttttgtgtctggggtggggaggggttggtgttctgggattagtgttgtttatttgagtgtttgtggccgggagtggtgaggtgtttctggagctgagtgagtttttgtggtgggtatattgtaggttgagttttttttaggatagggtcgttgttgggtcgtttttgatttgagttgattgttttttgtgttgtttttagtttttgtttgagtgttggaggggttgttttgggggatgtttttttttttttgttttttgtatttttgtaggaattgttgattttttaggttggccgggtgttttgggtttttgtgtgtttgtgtgggtgaatggggttggggttaggtggaggggtgtttttgggtttagtttttagggttggtggtttaggtcgtagtattttttttttggattttttttggttttttttttatttagtggggtatgggatggtctttagatgggattgtttagtagtgtttaaatttggtgatttgggtttatgttttgtgtttaggatgttgtttgt

SEQ ID NO: 44 - DNA, 2365 bp, Artificial Sequence; identical to SEQ ID NO: 16
  Bisulfite treated of artificially treated Q9HC74 at ggcC, agCt, Ccgg

SEQ ID NO: 45 - DNA, 4261 bp, Artificial Sequence
  Bisulfite treated GSTPi after artificially treated at ggcC, agCt, Ccgg
aataagagattaatatttagaataaatggagatttgtaaattaatagaaagtaggtagtaaagttaaagaaaatagtttaaggtatagttattaaaaggaatgtgattatgttttttgtagggatatgggtggagctggaagttgttagttttagtaaatttatataggaatagaaaattagtgagattgtatggttttatttataagtgggagctgaataatgagaatatatggttatatggtggtgattaatatatattggtgtttgttgagtggggtgttggggagggagagtattaggaagaatagctaagggatattgggtttaatatttgggtgatgggatgatttgtatagtaaattattatggtgtatatatttatgtaataaatttgtatattttgtatatgtattttagaattttaaataaaagttggatggtcaggtgtggtggtttatgtttgtaattttagtattttgggaagttgaggtgtgtagattatttaaggttaggagtttgagattagtctggtcaatatggtgaaattttgtttttattaaaaatataaaaattagttagatgtggtatgtatttataattttatttatttgggaggttgaagtagaattgtttgaatttgagaggtggaggttgtagtgagttgttgagattgtgttattgtattttagtttgggtcatagtgtgagattatgttataaaataaaataaaataatataaaataaaataaaataaaataaaataaaataaaataataaaataaaataaaataaaataaaataaaataaaataaagtaatttttttttttttaagtggtctttattttttttttttgttttgtgaagtgggtgtgtaagctctgggattgtagtggttttagggaatttttttttgtgatgttctggtgtgttagtttgttgtgtatattttgttgtggttttttttttgttgtttgtttattttttaggtcttgttggggatttgggaaagagggaaaggtttttctggtcagctgtgtggtgattctggggattttagggtgtttttttgtggtcgatgtctggggtgtagtggtcgctggggttggggccggtgggagtttgtgggattttttagaagagtggccggtgttgtgatttagtattggggtggagtggggtgggattatttttataaggtttggaggtcgtgaggtctttgttggagttttgttgttgtagtttttgttattagtgagtatgtgtggtctgttttctggggatggggtttagagcttttagtatggggtcaatttgtagtattaggtctgggtttctggtagggttttttgtttattttgagatctgggatgggggtctaggggatttaggatgtttttagtgttgttagtggtttttagggggtctggagtgttttggggagggatgggattctgggggtggggagggggggtaggttgtgtttattgtgttttggtatttttttctgggttttagtaaatttttttttgtttgttgtagtgttgttttatattgtggtttattttttagtttgaggtaggagtatgtgtttggtagggaagggaggtaggggttggggttgtagtttatagttttttgtttatctggagagatttgaatttttttatttttttgttgtgtggtttttattctgggtcttttttttgttttttgttttttttgttatgtttgttttttgttttagtgttgtgtgaaatttttggaggaatttgtttatttgttttttttttgtatttttgatttttttctgggttgttgtgaggtggagttggtctggtttttatattttgtatttttttttttttgtaggtcgttgtgtggtcttgtgtatgttgttggtagattagggtcagagctggaaggaggaggtggtgattgtggagatgtggtaggagggtttatttaaagttttttgtgtaagtgattatgtctgggtaaggggagggggtgttgggtcttagggggttgtgattaggattgggggatgtttaagcttagtgtttttttttgagttatgttttttttaatagctatatgggtagctttttaagttttaggatggagattttattttgtattagtttaatattattttgtgttatttgggtcgtatttttggtgagttttgaatttttaagtttagggtaggtatgggtaagtttttgtttctggagtttttttgtttaaattagctgttttgtagttttttggagtggaggaaattgagatttattgaggttatgtagtttgtttaaggttaagtttgggtgtttgtaatttttgttttgtgttaggttgttttttaggtgttaggtgagctttgagtatttgttgtgtggtagttttttatttttttatgtatattttttttttttttttttaggttggggtttatagatagttttttggttggtctatttttagtgattgtgtgttgattaggtgtttagttatgtggtctgtttttttttatttaattttagggttttatgggaaggattagtaggaggtagttttggtggatatggtgaatgatggtgtggaggatttttgttgtaaatatattttttttatttatattaattatgtgagtatttgtattagggttgggtattgggggttgaataaagaaaggggttttttgtgtttttattttttttattttttaggtggtttgggttgatttttttttgggttagggtgtaggggttgggttagctttgggtcaggggtctaggggtctgggataagatataatttgtatttttattgtttgggatattaattagttaagtaatgggttatgggggtgagtgtaaggatagagatttttagtaattggtggtttttgattttttggggtggtgagggttttttggagtagttagaggtggaggaggatttgttgttagtttttggatggaggtgttggtatttttagctgaggaaaatatgtagatatagagtatatttggggatttgggattagtttagtagaggtagtgtgtgtgtgtgtgtgtgtgtgtgtgtgtgtgtgtgtgtgtgtatgtttgtatttgtgttgggtgggtaaggagatagagatgggtgggtagtaggtctaggttttgaaggtcttgaatttattggtttggagttttttaagggtaatgggggtcattgagaagtttgaatagggttgtgtttgaatgtgaggtttagaaggattttttagagaagttagctttaaagcttttgtaattatttggtgagagaatttagtaaggatggataggtagaatggaatagagatgagttggtagctgaagtggataggatttggtattagtttggttgtggggagtaagtagaggagaatttgggattttggtgtttggtctggggtagatgggggtgttttaggggttgggagggatgagagtaggatgatatatggtggtgtttggtaggaggtgggtaaggatgattatgtgaaggtattgtctgggtaattgaagttttttgagattttgttgttttagaattagggaggtaagatttttattgtgggagattaggtgagtatttggtcttatgttgttttttttttgttattttttgtttttagatggatataggtgtgagttatttgtttagtaaagtagagtagatttaggggatgggtttaggtcttttgtttttaatttttttagtttgtttttgttggttgagtttttagtttttttgttttgtagattttttttgttgattataatttgttggatttgttgttgatttatgaggttttagtttttggttgtttggatgtgttttttttgtttttagtatatgtggggtgttttagtgtctggtctaagcttaaggtctttttggtcttttttgagtatgtgaatttttttattaatggtaatgggaaatagtgagggttggggggattttgagtgggaggtagagtttgtttttttttttttaggattaataaaatttttaagagagctattatgagtattgtgttttttgggatggggtttaggggtttttagttttgaggttggtgggagggtagagtagaggattagaaaatagcttttttagtatagttagtggttttttggagtttttagtttggttgtgtttattgaattttataaattagaagaggaagaaaaaaaaagagagagagaaataaagagaaata

SEQ ID NO: 46 - DNA, 6343 bp, Artificial Sequence
  Bisulfite treated PITX2 A after artificially treated at ggcC, agCt, Ccgg
gattgtttatttttgttattagctgaaggtaaggtcgttttgttatgagtgttttttaatttttataaaatgaaaagaaaaaaagggaggattattagtttattatttagaggaatggggaggttgtaaaaattgttgatgggtagaggtgaagatgttttttttggattgtattttctggtgttttgtaattagagtttagttgtgggatttgttgaagaaatttgatttttttgttttggtgagattttaaaaattagaaatagaaatttttagagttagagaggaaatataattaaatagtatgtgggtatttttttttttatttttttttttttaaataatattgttttgagtttttattgggtaaagagagaaagtttgagtttttatggatgttatgtggaggttagaaatggtttaaaatgtagatttttaattagttttttttgtggttgaagaggttaattttttttataaaatgagtttatttgttgattgttagctattttaaagtgaagggatttagtatttaaaataaattgagtaagtttgtttgtttgtttttattgttaatttaaatgaatttaaaatatggagtaatttaagaaaatatataatatgttttagatagtttttaaaagtagggaaagtttagtatttatatagtgattagggttagttttaagtgttaagcttttttaaatgtatttattttatgtatatttttttgagttattatatatttttaaaattgtgagtattggtatattgatttaggaagagtaatataatttttagagggaattttatttttaattagggattaaagagatgtttttttaatagtgggtctgagttttgtttttaagtaggaattaatattggtgggaaaatttgaatttaggagtaatggttgtgttctggtattttttaaaaatatatattaataggatgtttttgagattgaaaaaatattgttttatatgtttggtagaagtttttatatttggttttttaggtgaattatatttatagtttttttatttagaggtaggatagagttaaaatattttgtttattattaaaatatatatttttgtttaagttaagaaattagaaaattagggtttagaagtaaggtatattttttgagtgagaatatgttttgtaattttatatattttttgttttgtaggagtaaatgtggatttgagggaaatttttttttttatttttatttttattttgtgtaatttaatattatttttgttaggaattttaattttgttattttaaaaaatgagatatttgtgatttagggtgaatttgttgaatgtaggtatagtagaggaaattttagattttatgagtgtttgagttttgtttagtgtaaattttttgtgaatattgggttagtgtgtggtcgtgtttatttgtgtgttgatatttttagtatgtttggtttatttgttttgattttgggtgtggtgttttagctaagctgggtctagtgttctggtcttttttagctgataagtttagcttgtttgtttctggttgtggtctttttatttttttttattagcttattttatttttttagatttttttttatttatttttttttatttttattgtgtttatttttatttttgttttttactggttttttatttttttttttttgtagtttttttttgttgtgatttttttttttaattttgtaggtctgaaagaaggttatatatgtatgtttatatttatattttatatgttttgttttaaataattttatgaatattgttttttgttttgttttttgggtcattttttttgttgtttttttttagtttgttttgatttgttttttaaaagtatgtttttgtttttttgttgttttggtgttttttttttgatttattagggttgctgggttggtgtagattgttttttttttttttttattttatttttttttttggtttttttttttatagtgggagtttgtgtttttgttttttggttggtttttaagtgttttgttaggttttttttttttttgtttttctggttctggtttttgattttttggtctgttggtatttgttttttttttttgttttgttttttgttgtttttgtttgttttttctggtgtttgtctgggtgttgtgtttgtttttggattgttagttgtgtagtgggtttgctggtgtttgtgtgttattgtgtagtggagtttggtggaatttttgttgatgttatgttattttttatatggagtaggagtagagggaagagagagggatgagagggagggagaggagagagagtgtgagattgagtgagaaagctggagaggagtagaaagaaattgttagtggtggttagattttggaggtcttagtgtatttgtggatttttttggaatttggtatttttaggagttttgtagtttttttaggtctggtttttgggtgtttgttgtgtagctggaggtttggtttgttggaaattgttctgggaagtagtgggatgtggagatagtagcttttttctggtagctggtaagtggaggtcatttattttgtagggatgtgagataatgtgagtttggaaatttgttttattttggagaatttttattgtaggtgatttgtggtttttggggttaagttttgtttaaggtaatgtagttggtaaatagattttgtaaagttttgttttttttgttttttgttatagatattaataatttatagggtgttgaagttgagagggaagttagattgtggttggtatttaaaatgaggtatttttttttaaattttggtgttaatattgtaggaataaatttttgggtcaaggattagtatttttaagataaagggttgggtataaagttttagctattggaagattagttttttttttattgttatttattgggaaaaaaaagaaaagaaaaagattttattttaattggtagttagtgattttttaggtctaagtgaattatttgggagttaggtctggatgttaagcttttattatttttttggattgtaatttttttaaattgattattagttaattttaatttggtattttaggagatatattttaaatggatgtagagaattattttttagctggagattaagaaaaaaatttttgattttaaatttttgaaatatgttttttttttttagtttaattattttatttttttaagtaatttagaaattaaattattataaggtggtgtgatttttttttatttttttgtgtgagtattgttttattaaattaaatggaaaaaatttttattattataaatgtaaatattagaatttatatattttaaaatatttttatgaaaaattaatttgatttaaagaaatttttttgtatttgttttagtttattaattaaaattaaagatgtttttattatataaaatattattttggtagaaatttatttaaaatttaaatattaataatattaagaaaataaagtatataagtaaaataaattgaagatttttgttgatgtaatatgagtatataatattttaataattaaattttttttaaaaaattaaatagttattttatttgtggaatgttttattttaatttagtaaaattatatttaaattatttaggtgttttgttttttaagttaagtgtgtttgtttttaaatgtttttaaagtatttatattaattggttgtaaagaatgtatatatatggtaaaatatagaattgaattgagtagtattttaatttttttaaataattatttattataaattaatttattggttaattttataatttagtttatttaaaatatatgtttttgtgttgtttatttttaaattttttattaaagattttgttatggggtaataaagtgtatgaaaaggggggaaatgtgaaaggatttgggattatttgaattgtattttttttgtatttttagttttgtggtagttattagaaattattttttagtaaattgttttattttttagggtttgtttgtttgttttgttatggttttttgttttttgttagttgtgtagtgttttttgtgtgtttataatataaaatttaagttggtcaaaataagagtttttggtatatatattttaattagaatatgaattttgggggtgagaattattttttattaggaaaagttttttattttaatttgtgagattagttattgaagttagttttgaagtttggtagttaaattttttatagaagatttgttttgatagggtaagtttaaggattagtaggtgggaattggaggtttttttttaaaaaattattttttttagttatttagatttagtttttttagtaggtctggttattaaatgaagtataaaaatgtaagttttaaggtttattttgattgtaaaataaatttttaagttataaggatatgtaggagtgagctaaggaatatgttttgattttttttttagtttttagagtggagctttatgagtttttgaagatttgttttgtattgttttgtttggtttttagtattgaagtatggggaagtggggggaagaatgtgtaataattgattgattttatattaagtaatgtaattttttttttttgtatattttattttttaaaaaaaataaataaataaaaattatttgtagttattatttgtagtgttctggttattagctaataatgtagttagtttagatatataaaaaaaaaagattattgaaatgatgatgatatgtaaattttttttgaaattattataagtaaatatttgaagtttggattaataaaattttatttgtgttattttatattgagttagtagaaagctgtgataatgaattttgtaatattttatgaatagatattttaattagggattaattttgtgattttattgtagaattattaaatttggagttgttaaattgttatttttgggtctatgggtctataaggattgaattggtagagtttttgtttgtgtttttgttagtgggtgggggaattgtttggtcgtttttattttggatttttatgttatagtgctgggtagttttttttgtaggtagtgattttggtcagaggttttttagggtctagctttttttaggagaggtcgagatgtagggaaatggtatttaggtcagaggtaggtctgtagctttttgttttgtttttgtgtttttgttaatttgataatgtttgtttttattttgatttttgtatttgtgtgaagtgggtcttctggttgttggtgtattttggttagtgtggagagaggtaggtgttgagattgaaggggtctagggagttttggattttttttttttgtttttaaagtaattgtggtttttttatttatctggtggagttttttgagatttattttttctggtttgtttgtggtagagaagggggagtgtgttaaatgtttggtttgttgtgttgtggttgaaaatgtgaaaaagatttggtttgtctgggagagaaagggggagaattgggtagtagttatattagagctatttttttgtttttggtgggtagtaaattttttaagaatgtttgttttgttttttttagttttgtttagtttatttagtgttttttttttgtgattttaaattatattttagggtaattatttgtagtaagtaaataaatggccgggttagtatttttaggagaaagtgtggttaaatatggaaaagtggtttttgatggatgagaggtctgaatttagcttgtttttgaaatattttaggtcaagagtttgtttgttttagaattatagaaaattgagggaaattgttgtttaggataggggtatgttggtgttgatgttttataaatgtttattgagctttaattaatggataagtattgaagggtggtttttgtatatagctttttaaagagaaaagttttttttatttatttatttttgttgttattgtgtttagatgagtttttaattctggtattgagatttttgaaagtaggtttatagtttttttagtatattgtggttttatagttttttaatttttgggtatttttgtggtaattttggagggagatttttttttgataaataaatgttttgggtctgaggttaggttggagatgttgttgtatatgttagaggttgttaggttggaaaaatatgtttgaagtttagtatatagtaggtgtttaatagctagtgtaatgtagttttatttgagttttgtttatttgatggtcgttgttttttatagtttttttttttttttgttttgtaga

SEQ ID NO: 47 - DNA, 9001 bp, Artificial Sequence
  Bisulfite treated PITX2 B after artificially treated at ggcC, agCt, Ccgg
agctgatggatttgttaaattttttttttttttttttttttttatattatttgttagttataatggaattttttaggtttaagttaaagaaaaattggagagataaaattagattttgtagttttttttttttctgggaatgtttttttttttttttttagtttttgatgaatggttattatttatttttattaaatttaaataaggattgttgttttgtatgtttaattaggtaggtagagggaattggtttgtttaggaagtagtgattgagatgttttggtcaagttagtgatagaggaggggagaaagaatttagattaatttgtatgtagtatattttatttttatgaaataaaatatatttgttttatatttgttgaaaagtaaaataataatattgtatgaaatgttatatatagggtaggttgtatatagtagttttagaaatattattgtatttattagagaaattattttaaaattgatatttatatattttttataataataataatatgttagaaatatatagtgtggtatttagtatatatatttttttgtttgtaagtgaaaaattttaattgtttttgtataatatgttttattttaaagtttaatttttaaaaatattgttgtgatattattaataattgtttttataaaattaatttgatattttgatatatatatatttttttagttatttaaatgttaataatgttaaatttaaaaaataataagcttatagtaatgttaaaatgttatatttagttaaatatttgtttgtgtatgtgtttttgtaattgttagaaatatttgtagtgaaagatgttagatattgaggatatttttttgaaattaaaggagctttttttttgatttagtggtttttttttttttatatagcttttttttttttttttttttttagtgtttatgattttttagtataatttttagttttttaagggtggagttgttttatctggtaaggttttaggattctggtgttgtgggtgtggtttatatgggccggtttattgtatattggtaagtatttaggttggaggccgggttttgtatgttggtgtagttgaagctggagtgttgttttgtttttagttttaggttggtcaggtttgagttatatgtgtttttataaatatatggaggagttggtggtgtgtaaggataggtaggtgttggtattgtggaatttagtgatgggttatttaggttgtttaagttatttaggttgttgagattggagtctgggatgtttgttattgttgagggtattatgttggatgatatgtttatggatgagatagagttgggtggggaaaatatgttttgtgatgatagggggttgatgtttatagagttgaagaaggggaagcttttggtggatagggaggtggatgtaaggtctttggtggtctagttgttgtaggaatagtttgggtatatgttgttgtagggttgtatgagtttattgaattgtggtctgaagttatttttgtatagcttggtctgttggttgtgttttttttttttttatttggtctgatgatttttgaattaaatttgggggtggttggggtaagggagtaaatagatgttatagtgtagattattaaaatttttattggaggtcaatttttgtttttttttgatatatatgttagtgtatttatatattttggtcttgttttattgtattgttttgtatattaagatattagggtcagcttttagttattggtctgggtttttattaagtgtaggagatttggtttgttttggtctgtgagctgggatttggagctatgttataaattttagttgaatgtatggagatttgtggatggtttgattatttagttaggtgtttttttaggtttaaaaatatttaatgtaaaataaatgtggggtagtaggtttttttaattttttctggggtattttgtaaatttgtttttattttaaagttatagatttatggatgaggagaaggggttggaagggtattagaggattgtttttttttttatgtaattttttttttttttttttgatttttattgttgttttttattttttggtatgtgtttttttaatagggattaggtcgttaatatttttttttgtttagtaaaataattaaataaagagtaaaagattatttttttgttagcttgttaattttaggagcttggtatattaaattctgggaatctggaaagggtagttttggagattttttttttttttgttttgttttttttttattttaagtttattataggtctgtttgtgtgttaggtctagctgggttgtttggttttgtaggtggtcatttaggccggccggtttttatttgtgtctggtggtctagttgtaattttgattttaatttatattgggtctttttgttgttttagatggtggtttttgtgtattggagagaggtctggtctgagatatttgagctgatattagtgatgttttatattatatatttttgctgggtctagttgtgtaatttgttttttttttttttttttttatttttgattttttttttatttttttttttttttgtatttgattgttataaaaagtatgttttatttttatttggtttgataagtagttgttttggaaggagaggtagctgtaaggagagtttagtgttgtggttataaagtattagggtggagctgtggaatagtgggtggggtgggagggtgtttttgaaggattttagaaaatttatagattttgtttttaattatttgttatttttattttaggtcatttaaattttgtttaggtgagaagagtatgtgagaggtctgtttttttgatgtgtaagagagctaatgaaagattgattttgtttaaaattatgttgtttaggatttagctttggttttggatagttaaattaaaattatttttaatttttttctggtcttttatttattagtatagttttatgttttgtataaatgttatttagagagtgtttttattttttttgatttgggagagtattttggtttttattttttttattgttgtttttttttttttgtttgttttgttttaactgggggttttattttttttatttagagtatttaattttttttttttaatagtaaagtttttggatgttgtttgatttgtttgattttgttttttgtttttagaattttaataaatttggaattttttattgattagtataaattaggatgttgttattgggttatttatttgagcttatttttgttaatttataaagtatagatttgttataaagttaaggtaagttttttttataaaattatgattataatttagaagagggggtgtgagttttaatttttagagtttaatttttgagagaagataaataaattaagtagaaaagttttttttttttttttttttttttttttaagaggattagtagttgtgtattaaaattttgtttctggagattataaaattaggaaatagggtgtgtgggagagatttgaatggtcgaaataattgtaaagaaggtgtaagaagtgtgagtttaggagggaaaaagctgggtcagggccgggataaaggttttttagggagggtcaatttttttgtgtttttggtgggttttttttgttaaaggtttataggttggagtttgtttgtggtttttggtctggtagggattttattagctttgttttggtaattgtaagttaggaatataatgttttgtgtaggggattgtttatgtagtttagcttgtgagattgtgggatggtggggtagtgagctggtgttgttttgggagtttgagttagggtggtagttttgttggtcttggagagggaattgtaattttgtaattaggtcgttgtgaggtcttttgtttttgtaaagctgtgttttactggtgtttttttaggtggtgttgttttttatatttttttttggtttatttggtctgtatttttataatattttttttttattttttttagattttgtgttggtttttatctggatttgggtttttgtaaggttggtttatatagtgatttttttgtgtgtggatatgtctgggtagtggtttttttggaaagtggtctttagcttttggagctgttggttggtaaagtgagtttgttgttgtttttgttgtttttttttagatgggtttttggtgtttatgtttttattttttttttgttggtttttatttttttttgaaaatgaaatatatatatttttttgttagtatgtttatttgtaatgtggatgttaattggactggtggtagaagttgtggaagagctgggttgtttggtgctggaggagggtgtgtgtggtggttctgggtcgtgaggagtgttgtgtttgtggggtgtgtaggtgtaagtgtgggtgtttgtgttttattttttttttttttttagtgttgtatgttttatttatatgtttattttattgtagtggtatatttatttttatagtttgtgtttttaagtatatttatatatttttgtgtagatatattaaattttttgggatgtgtatatgtgtgtggtttatagattttttttttttttgtagaaagcttagatttttatgtggtttgggaaggttaggaaaagatgtggggatttggttgggtattgaagtttgctggtctttttttaaaaaaaaaaaaaaaatgtttttttgtgaagggtatttttgagtggttttaggtaattttttaatgagtggagctttttgggagctgaaagttgagaggaaaatagggatagaggttggtggtctttgaaggtttttgaattaagatgttgggatttttgtgatttaggaaatagaagggaggtcagggtatgaatagagagggtggtagaattgtttgtgtttttagtgttttaggagctgggccggttgagggagaattaaagggatgtggggtagttaaaattctggtttctggaagttttgtggggagttaggtgaatgattatttttattatgtttttttctggaggggttgatttttttggggtgagagggagtgggtggtgtagagtagctgagtgggaatgtttgtagggtggtgtggtgttttatttgtggtctctgggttggaggtgttggagatggtgtgtatttttagtttgtgtttggaggagtttagtgactggggttgactgggagttagaattgaagttatggttaatggttggggatggtgataggaagatgaggagatggtcgatagcttggtttttgttgtttggtgttttaagtgaagtgggtcttttatgtagtttatggatgagggagtgtgatgttttattagtttttggttattgttttgttgagtttttgtagttgttgttgtttgttctgggttgtgttttaggtgtggagtttttttgttgtggggagagttaggggatgtaatttttgttgagtttttaagttaagctgtttttgttttttctggaaggtttaagtgaaaaagtctggagatggaaagttagtgggtaaatgaagatatgggatgtgggtagaagggtattatttagagtgtttttagggagtaggtttttaagctttaaagtgaaataagagtgggtaaagatttttttttttttttttttttttttttaagaatttttttaataaggaaagctaatgttgattgtgttttgtttgttttttttttatgtggtagttttgatagagaagtgttaagagtgatagggataggtaggtgatattagattttttgtggtggtagtagttgttgtagttatgatgtggtcttttgagtgtattttttgtaatgtgtatatgtatattttttgggtggttgaataggagctgggtcttgttgtagcttagctttaggtatttaggtgagtgatggattagatttgtggttttgtgtttttttgttggtctaatattttaaaattagaggtgggttttttggtgttgagatgttattttgttgtggtcttttttagttttttttgtttttgtttttttttagatttttttctgggtgtgattgatgtggttttgtattaattaggatgttttgagttgtggtggagggattgttttgtttgtatttattagtagtgtggggccgggttattgttttgttgtgtgtattgggtttatataggtaagcttctgggaatttagcttttgtttagtttaaggtgatctggtttttagtatgaatttaaaggtgaagagatgaggttaggagttgaaggtttgggagaagagagtggaatggttaagaagagaaaggtataaggattaataagatatttattttttgtgttttattatatttatttttaattttttattttatataaaaaggagatatgttatttaaaattagaaaatttgaaaaatagtaataaattatttttttgattttaaattttttaaatagtttgttaagtgaatgttgtgttaatttgaagaagctttaattgtaaagaagatagagttttgaaaaggtaggttaataaattagaaattgagaagtaaatggatttgttaaaagaaaattattttgattttaaatgaataattgtttggtggtttattttggatttatataagaataaaaagttgttttagattatgttttttgtgatgtttattagtttttagatagaaaatatataatagaagagaaattttaatttagtgtttttaaaatgttgaaagcttatttattttatttaatgttgattaagatatatattttagattttttaaattttttgtatattgtattaagcttgttttaatttgagagagttatgttttaaatttgatttttttgtttattttattattaattagatttaaatttataaagtttgtagaattaataattttgagctaattatatatgaaatatgttttaatgaatttttatataattaagaatgttgttaaataattaattttaaggataatttttaatagttattttttttttttagtgagcttaaggttgttttgagttattaaagtttaagtaggtagaaggggtgtgtgtgagctaagggtgaaaagtttagaattgtgtttaattagtaaaagtaaaattttatttatataaaataaaaaaaattatttttggagatattaattttttatagtattgtttttaagtaaatttaatttttaaagaaattaaagaaagaaatttaaatatatttaaaataatttttgaaagtttttttgttttttagtataggttagctggagaggataaattaattttttttgggtttttgtatgggtgattgttttattatggagttagtgttattatttttgaatgtgtatttgtttgatattatagttaatgatttgtaatgttagtatgaagtatttttaaaatattttttttttgtttttgtttataagattgggaaatttatttgatgtggaataaagtggatgaagtagattataaatatatttgtaatttatgtgttttttttttgttttgattatttttaaattttatttgtaatttttttttattttaaatttgtagtttaaagatgtatatgagaattgttttttagtttttttttattagtattattttattttaagaataatttagctgtaagggaggaatttttttatagtaagctttaaattagtatttttgtttttaattttttattttattttattttattttatatatatagatatttgtttagagtaaaatatatttttatgtgataggtttgtattagctgaggtttatatatttagctatattaggttttgtaattttattattaaattatatatattatattagtagtttgttggtaaagaaggttaaattaatttatattttgtttattatttggtgtttaaatgatgtattttattctggagatttggtggagaattttttttttagattttatagtgttttattgaagataatgtttttatatttgtagtggtttttaatttgataagattttaatttgtttaagttttttaaataagggttttaaatgtttttagttgtttttttattgaattttttttaatttttttaagattataaagtatatgtgtaaagtaaatatttttttttattgtattgttagttgatgatttataattaagttaataagaatttagcttttttttgttgaatgtgtttattaattatattttagtttttttttttaaattttagaatagctgtggtttttataatattatgttttttaaagctttattttatgaagggattttattatattaaagaatgaaaaaaatttttattgtagttagtatatatagttttttattttttgttttttaagatttaaattttagagctgtaaatatttttggaagcttgggtgttaatgttttattttagaaagttgagaagttttatagagttatatagatttttaaatttattttttataaatttatagaattttgataaaagctttggtggttttattttattgatggaatttttattatgataaatatatatgtatgaaggattttaattagtttttaaagtggttgaaaaatttaagggtatgtgattgttttttatagtgttaatgtgtgtgagatgttggaagtattggggattagtagtagtttagatgtttaaaaagataaggtgttttaatttgtgtggatttattgaagttaagtggtgaataaagataattatttagataatttagattaaagtaaaagtaaaattatatttatttgtatatatatatttatatttattttatattatagatatatatatgtatatatatattggttttgtaaataattgatttaaagtgaggattttttttgtatttttttagtaggagttttaatatttttttaattttttaattattttata

SEQ ID NO: 48 - DNA, 1920 bp, Artificial Sequence
  Bisulfite treated RASSF2A after artificially treated at ggcC, agCt, Ccgg
ttaggttgttgtagatatagtttttgtttttttgaaaaatatgttttaggtgctgggattttagatatttgggaaatagagtgtatgtagctgttgagaggtcttgtgtttggttttttttattattgaggtgtagaggtgttgtggatagtttagatttatatggtgtttgaggtgaaatagaatttttagtttttttatgaggtcattggtatttttggttgtttttagagctttttgatttagagctgaatgtaaagtaagtgtttgaaatgtagaagtagctggggtcgtttatggtatttgttttgtttggggtgagagaagatgttaggttgaggttttagtgattttaggtattagctttgaaggagggtggggagattgtaaaggggaagtgtctggagggtcaatggtctttgtgtattttgtgtttttttgaagtgtgttgtttttttgtgctggggattgggatttgtttttggggaatttgtttagaagatggtggtggattggggttgggtattttttagggttgttaggtcttttttagttttgtatttgttgtgttgttttattttgttaggaagttttagagattctggggatggggtgggagtgtttttttattgtgggtttaaaaagaaggaaggatgtttttaggggttgtagaaggaggattagctttaagttataattttttttggatttaaggtaggccggttggggttttgtgtttatatggtctttggtgggggtttgtgtgttctgggagttttgtggtttggggaggaaagaggagataagagataggtgaggattatggggttgatttagctggggtagggattattgtggaaaaattttggtgaggtggggggatgtggaaagagagtggtctgtgttttgtattttgtgctgggtattttgtgttagtgttttgtttttagtgttttgtgttttgtgttttgtgttttgtttttattctgggtcagctgtattgtgtttgtgttgtaggaattgtggagttggaaagtgggggtgttgtggttggggggttgttttagctgtgttttggtcagtgattggtgggccgggtttaaatttagttaggttgggtaggtggtggtcgtgtgattggggactgggtgttttgttttttttgtttttttttttttttttttttttttttttagttttttggtcttttttagtttttactggatttgtttgtttgttgttttttttttttttttgttttttatattattttttatttttttgttttgtttttgtttttttttttttttttgttttttgttttttttttttttttttttttttttaggggtggagcttttttttttttttttagataatgttgtggttgtgtttttttttttgttagcttgtttaggtttttgttgttagtgatttttctgggttgggggtggggaggtggggggggagtgtagggttggggaggatgagctggttttttttatttttttgttgttgttttttttaagagggatggagatttggtctaagctttttggtttatctggagctgtgatagttatttttagggaatagttatgttgttttattaagtttatttttagtggtctggattttttaggtagaggttgtgggattttgttttttttaatattttagcttatttttaaaagggtttgagctggataggggttaaataggtctttttgatttggtgggccggtcagatgtgatagtaatgttaaggaggtcaagtttttttgtttattttttattttttttttttttatttttggattttttggtgtttttagtatatagaggtctttgagtagtctggttgtaggttttttatttatttagagtttttttttttatgtgtttatttttaattttgta

SEQ ID NO: 49 - DNA, 5473 bp, Artificial Sequence
  Bisulfite treated SHOX2 after artificially treated at ggcC, agCt, Ccgg
gtaatgttaattagctttattttaaagaaaaattaaatattagagtaaataatgatttttttgtggagaaggagttgtaagggttggggagaggtaattagtgttataaaagttttattataaagaagtttagaatttttttgttttgttgtgtagtagagtgaaatatagtagtagaataattgtgtattattattatgataatttaatttgtttttttagaaaaagttattgtttgtagttaggatagtaggaaaatatttagaaaataattaaaatgtaaataaaagtatgaaataataataaagtttattttttaagagaaaaaaagaagagtatttagtgaaaggagaatgaagtatatataaagtaagtaatttttaggtattttgtttttttggatgttatttgtttaaatttgataatttttataggtagtatgatagattttttaaaatttaaataaagcttgtttttgtattttatttttaataataaagtatattgattgatttataaattaaagtttttaaaattttattaaagtaaaaatattgttttagagcttttattggtatgtttttgaaagtaagtgttatagttaatgtaaatttttaaaaatttttttgttatttagtataatagagggtggattttgtgttagggtggtattttttgtgtaatttatatggtctgaggttttttgttttttttttttttagaagagttggaattaagatattaataattataattgtaataattattattatgtttttaaggggttgttgagtttttggagattttagtgtatagagtgaagtaggagaggtttaaaaaggaaggttttgttgttgatgttgtgatgattaaggtagtttattattattttttttttttaatgtgattgttttgttttttttttttttgattttgttataagatgtggggaagttttttaagaattgtgtatagtttgttatagatggtggtttttgtgtttagagattgaaagagtatttgttatagtgatattttgtaatagctgtagatgtgtgggtctaaaattgttttatgtgtttaaattaataataattattattttattttattttattatttgagtggaaatataatttgaaatatttaaatttgttttttttaaagctagaaggatatgtgtatgtgaatgtatataatttgtttttttaaatgtttttaaagtttatttttgttattatatttgtttttataattaataaagaaaatttgttttagttttaattttattgggtatggtatgtgttggagggtaggttttggaaatataaatattaatatatgtggtttgttttaaaatttaatgtatttagggttagttttgttgttttggttaaatgaatgaataaagagtgattaaaatgtgtttatttttttgttattttatatatagtttgagattgattgttaatagtagattgtaaatttttgtatttaatagttattaattttttttatagtttgtatatttataaatttaattgggatatttgtttgataaatttagattttgtagagtagatttttaaggaaatttaattttagagaataaaatattttttggaatttttaaggtatttagagataaaatgttttttgtgggatttttttttaagttttataaaagtaggtctattaggattaaattatattaaagttagtgtgaggtaaggggggtgtggtttatagaaattttgggagaaagtttagtatagctttttttttttgggaatatatgttaggatggaaaaaaaaaaaaggaggggagtgttataggattaagatttattttggaaaataagatttttagtaaagatattttttttttttttattttatattagatattagaagtattattttttgagtgtgttttttaagtttttttttaattttaggttttttttgttttttgggtctttgattttttggtagctgggtatttgtatttgggtctttgataggtctagttgttggtttagttttttttgtatgaaggtgttgggatagtgggttttgttaaaaagtttttttagcttattgagttgttttagggtgaaattggtttgattttgtttttgtttgattttggtttggtctttgttttttattttttttgtattttttttgtgattttttagctctggggatattggagggggtattttagtggggtcatatgtgtatttatatgaatatatatatatatgtatatatatatggatgaaaatagtatagtaaattttgttattagatttgttgtaaaaaagaatagagaattttttttttttgtggaattttggtctggttttttaatttatctggaggaagaatattctggagaagtgtaaaggttaagtttgagtggtcgtttggggtaaggtgggtagttatttattattttttttataaatgtattttgatttattgttttattatttattttttagttactggtcttttttagtaaatattaaatggtttttatttatttttgtatttatttgttttgtagtatttatagaaattaaaggtgtagtgttaggtcttttatagagtaaagtttggatataagggtgtggtaaggtcatttattggtcttttatactggtcatttttagaaggttggtttgtttttaggtcagcttttattattgttggttttttgtttattgtaaatttgttggtttaatttaggaataattgggtcgaaaggtattagtgagagtaatagattctggtgttgtgttgtatagggagttgtatttgtagatgttttttgttgtttttgggtttgggtcaaattttgtataaggttttttggatagttaggtaatttttgttttgtttgtttgactggggttgtatgagtataggtgtttatgttatgttggttgtttaaagggtttgttgtttaagctgggtcagaaggtaggaggtggaaaattagtttctggtggtgggtgaaagtaattgttttttttgttttttttttgtttttttttgtggaaatgtagatttgattttaaatgtttaatttatagagattaataggtttaagtggaatatttgtgatttttggtttttattggttgtttaaagtttttttatgtaattagtagcttggatgtttaataaaatatgaatttttttgttttgggtttgtatatatttgttgttatttttttgttttttttttttttttaaaaataggagcttttttagtgtgagtatatatagttattatatatatatttttttggaatttttattttttgtgtttgaattagagattctgggttttaagaagttaaagctgagtttagatagttgaggttgtttgtagttttttttagtgtaggatttaggtcagtatgggtgttaaaaattatttctggaagagctggtttgtagagaaattaatatttgttttgagcttggaaattaataattttaggaattgtgtttgctgggggtttagatttgaattttgttgttaggtgtgttggtgaatttgtagtttgggtctgtagttgtggatttatggccgggaggttgtattgggtattttgatggtaattttattattttataaatttaggaagatttggtgttggtttggaggaagaagagttgttagattttggtcttgctgggtattttagctatggtgattttaaatattgttgtattttttagtttttagagttagttttgtggatatttgttttttttttaggaaggaatattatagtaaatattatgggtcaatttaatagtaaagtatttttattgatattgtattgaaatttaaatatgaaaatatattttttaaattttgttaatgaggtgggaaggttttgtttattatatgttatttatatagtggatgttatttaaagttttggggttttgaggagatgtttaaattttaagttgatttatagatttaataaaatttttatttttgtttttaaatttttaattattgatttaaataggaatagattgtgttataaataatttaattgtttgtttaaatatgtgattttatgtatgttatatatttttttaattggaaaaatatggtagtatattagttattgtaggtattaagtgttaaattaattttattgttgaatttttttgaattggtatagaatgttttgttattgagataaagatgttttttaatattgagctagtattaaaggatttttgttttaagagaattgagtattgggtgattgaaaatattaaaggaattgtgtaaatatagatttttattttttttgttgttttttttttttgtttttaatatattaagaaattgaaatgttttgtctgggagaagtagtgtagtttggattttagcttttgttggtttttttttattttgaaagagaatgggaagttttggtctttaagatttaaagatttaggggttttgtggagtttgaggggttttggtggtcttaaatatttaggtgactggagggttaagctttttatttttgtttttttttttttctggtaaattttgtgttagaggttagctttagttttgttgtttggtttagtatttttttttgtagtctggtcttgtgaatttttatgtttgtttgtgggtcatctgggttgtgggtctatttttttgttggtgaaaaatgtattttggtggaatgggaatatttgggaagggtgtgtataaattttatatgtttttttttatgttatttttataatatattaggattttatttatgattgagtatattactggatttttatttttttattattattttagctgataaagctggggtttagggtcttttttgtgttttttttttttttttgttgggtcttggagtttttttttgtttgagaggagtctggaaggtgggaaggggaattgttgctgggggttagttaggttgttattttttgttagttgtgggttgtctggttttttgttttttttggtggtgtttatgtttagcttctggatgggagagtgtttttttttagcttttttgtttgttttttttttttttatattttttttgttttttttgttgttgtttttgttttttttgttgttgtttttgctggtcgtctggattgctgggttgttgtggttgttgtggtctgttttggtgtagctggttggttttttggtcttgtgtagtggtctgttttttagtattttctggtatgtgattgtttttttttttttttttattttttggttaaaagatttggagatgaatgttgtaagtttttttattgttgttgtatgttagtctggtgtttaatttttgttagtagagttttgtttttttttttttttttttttttttattgttttagtttttttaataataatatattaatgggataggaggtgggg

SEQ ID NO: 50 - DNA, 1405 bp, Artificial Sequence
  Bisulfite treated of Septin9 A reverse complement after artificially methylated at Cp[AT]
gtgggtggtgttctgagtgcaaaatgtgaatttgagttgtcaagtttgggtgctgctggatggtttcatctggaggttgttttgtgtttcactaagtagaggagaaattgaagagaatttgaagaaaggatgctgtggtctggatcatcagttctagaggctgaattcaaggacatttcttcatctagttttgatttcattcattcacacagatgcacagggattcaaagcatttggttgatctggaaagtcagtgatttctgtgagggtgcaaggggtgaggaagagggagtgtttttcagggcagtttctttgacacttgagcaagggctggagacagtgcaggggatggttggctcaggttgaaagtggtttgacagtggttctgttctgggaggaacttgatctgcagtgtgtttgttgtggggacttgctcagctttgggggtgtcttgtcacttttggttgcaggcactcaggtgagcagtgctggttttgggacattgatttcttttcattttgggtgtgaagttcatctgagtaagacttcttcatggtgtctttgtggttgttgctttcaggaaagtgtggtggtgaggcagtggggtgtgtgctttcagggtgctaattctgggttggtagtaggaaggtgggaagagggggtggtttgttgtctggagtgcattgattgggttttgttttggttttgtttttgttttgtttctttttggagatgtgcatagaattttggttcagttggctgtggttttgtttctgatttgttttctttttgttttgtgaatgtgtgtgttgagtttcatttttgttcatttctgtgctgtgctgcatctggtggagtggggctggtgggtgttgggtctgggagggggtgtttttgtgtggcagtgcagatcagatcagatcaggtcaggttgggggtgggggttgtctgtgtggtttgttgtgtttgcagctctgcattttcagctttttgtgctggtgtcaatggctggttttgggagttgttgcacttttcagttttgagtttgggtggggtgggtttggtcaggtggaagtgggtggaggtgtgggtgctttgggtggttttgttgggtgaggtggtggtgttgggcattgtggtggtgttgggcacagttgggggttggagttggggtgttggcttagtgggttggggtagggtgggacaggacatctgttctgctacttttctggtaatcaaaagggcagagtgtgttgattgagttggagtcttagttttctcatctgtaaatgggtgtgttggacagatgatcatttgttctttctgtgctgggcattgtgtgcagcttggtgtattggtgcagtggggcagacacagggagttgttctttacaacttgggtaatg

SEQ ID NO: 51 - DNA, 2365 bp, Artificial Sequence
  Bisulfite treated of artificially treated Q9HC74 reverse at Cp[AT]
gcatgtgttcaaagatgttcagatgaggaggtgttgtgggggaggggggtgggaacagcaagttctttcagctctgcagattcagatcttttctttctctgggaagcagggatgcaaagggatagagtctgaaaaagggctttcatcactaagctgacaaagtaactatgatgttttcagctcacactctgcacagtgtcagtggtcactggatcacaattttcttttgtttctttgttgtttcacattcttctcaggttcagttctgaagaacagtcactggcactctgcttggtgttcagtcaaagttctggtttttcaggaggttttgtctttttcactcagatagggctgatttcaggtgggttgtgtgggcagctgggctcaggacattcagatgtcagttctggttctggtcatggagtggggaggatctcaggctggtcatctttcagcttggtctgacatctggacagtttgctcatttcaacacagtctttttttcttttggttcatcagagggctctgttcaagtcagtctaggagtctctttgaggggtgggggcttcaggttttggcagaggcaggtttgtttctcagaagttctgtttcagagtgctggagatcattgtgtgagctttttctttgtctgctgtatttacttttgtggatgcaggatgcagagtttcagcattggcagtcaagaggatgcaggaaagtgcatgcactcacaggctcagagatgtggatgtcagattcaggcttggacagagcagttttgcaagtttcaacacactttgtaaattttgaagacaggagagagtcaaaatactctttctgtttgcatgcaggtttcttctgtttttcatggtttgattctgggaggtggatgaggatattttcaggtctggatgggggtcatgggacatttcactctagattctgtcatgatctgggctgtgtttgtttggtgcttttggttcatgggctgcacaacttggtggttttgaaactggtgtgggggaggggagggctgttcatttgagcaggatgtggctgttcactcagttggaggtgaggaatgatctttctattttgttgttgggttcaagtggggtttgagagttgttggggagagtcaaagggaggggattgatggatttttcagagtgaaactgtgtgttctggagagttttgaggcagtcttgtgagttcttgaggaggttgctgttgcttggcaaacacaaacaacaataaaaggaaggaaattcaggtggcagtgtgcagaatgagcacagggttctgtgagggtgtgcagggtctatgtgggtgtttctaacagggtttttcatgtaggtggtgtgggcatggggttgggggtgtgtggtgctctcagtgggagggtgtctggattaggggttttgtcttttctcagtgcacttttgtcttttctcagtgcatttttgttttgtgtcaggttcatttgcagggttctcttcagcatgtttgtggttgcagcagtcagttcagcattcatctttgaagtttgaaatgatttcattcagctgtgtgttgattgtggggtttgacatgatggctggtgggcagtgggttgtgtggagggcagtggtgaggaagtgtttttggtggggtttgggttctgtgtgctggctggggtgttgtgtttgtgcttctgcagtgcagagctagttgttggaggagtttctaggttttctggctcagctgaatgaatgggggaggaaggtgggtgttggtttctttttgtgtgctgtgtttttgttttgtttttgtcttttgggtggatcaggtttttgcatttgcattggtctttctgtcttgcactggctgctttgtttgtctgtcaaggtcaggtctggggggctggggtttgagtggttgctgggggacagttctgggcacatgattggagtgtttttcttctttttgtctggtttgtgttcaggggatggtgagagatgtggtctcagtttctttttttgggtgttttgctgtggtcagatgtgggtggatgtggaggttgggtcatggtgaggagggtgggtgttcagaggggaagagatttcttttcttttttgggtgcagggttcttctgcaggaggctgtatttgggcagtcaaacaaagttctctgtcattgttgttgtgtgctctgtgtctgcaagggttaaatggcagtgcatgtggctggcaggcaggattttggtctgtgggctcaagagttgaggggtgcagggtgaacatgtgagtttcatggcatcagtgagaggtcatcaactttcattcattgagggcatttctgcagctaacattttcatcatgatcat

SEQ ID NO: 52 - DNA, 4261 bp, Artificial Sequence
  Bisulfite treated of GSTPi reverse complement after artificially methylated at Cp[AT]
tatttctctttgtttctctctctctttttttttctttctcttctagtttgtgaggttcagtaaacacagtcaggctgagggcttcaggaagtcactgactgtgctggaggagctgttttctagttctctgctctgttctttcattgatcttgaggctgagaatttctaagttttgtttcaggaaacacagtgctcatagtagctctcttagaaattttattggttctggagaaaggaaggcaaactctgtcttttgctcagagttttttcaattctcactgttttttgttgtcattgatggggaggttcatgtactcaggggaggtcaggaaggtcttgagcttgggttgggcactgaggtgtttcacatatgctgagagcagggggaatgcattcaggcagtcaggggctaggatctcatggatcagcagcaagttcagcaggttgtagtcagtgaaggagatctgcagggcaggggggctagggactcagtcagtgggagcaggctggaggaattgggggcagagggtctaagttcattttctaggtctgctctgctttgctaaacaaatggctcacatctgtgttcatctggaagcagagggtggtgaggaaggaacagcatggggtcagatgctcatctggtctttcacaatgaaggtcttgtctttctggttctgggacagcagggtctcaaaaggcttcagttgtttgggcagtgtcttcacatagtcattcttgtttgtcttctgtcagacatcatcatgtatcattctactctcatttctttcagtttctgagacatttttgtctgtttcaggtcagacatcagagtttcagattcttctctgcttgcttttcacaatcaggctagtatcaaattctgttcacttcagctgtcaactcatctctatttcattctgtctgttcattcttgctgggttctctcatcagatgattgcaaaagctttagagctggcttctctggaggattcttctagatctcacattcagacacagttctgttcagacttctcaatggttttcattgttcttaggagacttcaaatcagtgggttcaaggtctttgggatctgggtctactgtttgttcatctctatcttcttattcatttgacacaaatgcaagtgtacacacacacatgcacacacatgcacatgcatgtgcacacatgctgtctctgctgaactggtttcaggttttcaaatgtgctctgtgtctgcatatttttctcagctaaaagtgtcagcatcttcattcagaaactggtgacaaattcttcttcatctctggctacttcaggaagttcttgtcatttcaggagatcagaaatcatcagttgctggaggtctctgttcttgcacttgttttcatgatttgttacttggctggttgatgtttcaggcaataagggtgcaggttgtgtcttgtttcaggtttctgggtttctggttcagagctgattcagtttctgcattctgattcaagaaggggtcagttcaagtcatctgaggggtaaggggggtgagggcacaagaagtttctttctttgttcagttttcagtgttcaattctggtgcagatgctcacatagttggtgtagatgagggagatgtatttgcagtggaggttcttcatgttgtcattcatcatgttcatcagggctgtcttctgctggttcttttcatagagttctggggttgggtggaggggagcaggttgtgtgactgggtgtctgatcaacacacagtcactggggatgggtcaatcagggggctgtctgtgagtttcagtctgggaggaggggaagaggatgtgtgtggaaggatgagagactgtcacacagcaggtgctcagagctcatctgacatctgggaggcagtctggcacagggcaaggattgcaggcattcaggcttgatcttgggcaaactatgtaatctcagtgggtctcagttttcttcacttcagagggctgtggggcagctgatttaaacaaaagggctttgggggcagaggcttgttcatgtctgttctggacttggaggttcaagactcatcaagggtgtggttcaggtgatgcaggatggtattggactggtacagggtgaggtctttgttctggaacttggggagctgtttgtatagctgttgggggaggcatggctcagggaggggcactgagcttgggtgttttttgattctagtcacagttttctaaggttcagcattttcttttcttgtttgggcatggtcacttatgcaggaggctttgagtgagttcttctgtcatgtcttcatggtcatcatcttcttctttcagctctggttctgatctgtcagcagcatgtgcagggttgtgcagtggtctgtggggagggagaagtatgagatgtggggattgggttgactttgtcttgcagcaatttggggaggggtcaggagtgcagggagggaacaggtaaacaggtttctttgaagatttcacacaacactggggtggggagcaggcatggtgggagaggtggggaacaggaaggaggtttggggtaaaagtcacatgatggagggataagggggtttggatctctttgggtgggtgaggggctgtgggctgcagtttcagtttctgtctttcttttctgtcagacacatgcttctatcttgaactgggaaatagatcatggtgtagggtggcactgcagtgaacaaagaaaagtttgctggagtttgggggaggatgtcaaggtgtggtgagtgcagtctgttttttctttttgtttttggggtttcatttctttttgaggtgctttgggttttctgaaagttgctaatggcactggggatgttctgggttttctaggtttttgttttgggtcttgaggtgggtgaggagttctgttgggagtttgggtctgatgctgtgggttggtttcatgctgggagctctgagtttcatttttggggagtgggttgtgtgtactcactggtggtgaagactgtggtggtgaaacttcagtgaaggtcttgtggtctttgagtcttataagggtggttttgttttgctttgtttcagtgctgagtcatggtgttggttgctcttctggagggttttgtggacttttgttggtttcagttttggtggttgctgcattttgggtgttggttgcagaggggtgttctggagtttttggagttgttgtgcagctggttggggaagtctttttctctttttcaggttttcagtggggtctagggagtaaacagacagcaggaagaggattgcagtgaagtgtgtgcagtgaactggtgtgttgggacattgtggggggaaattttctaagattgctgtgattttggagcttgcacatttgcttcacagggcaggggagaggggtggaggttgcttagaggaaaggaaattgctttattttattttattttattttattttattttattttattattttattttattttattttattttattttattttgtgttattttattttattttatgatgtagtctcatgctgtggttcaggctggagtgcagtggtgtgatcttggtggctcactgcaatctttgtctcttgggttcaagcaattctgcttcagtcttttgagtaggtggaattataggtgtgtgtcacatctggctgatttttgtatttttagtagagatggggtttcatcatgttggttgggctggtcttgaacttctgatcttaggtgatctgcatgtcttggcttttcaaagtgctgggattacaggtgtgagtcatcatgtctggttgttcaacttttatttgaagttctggggtacatgtgcaggatgtgcaggtttgttacataggtgtgtgtgtcatgatggtttgctgtacagatcatttcatcattcaggtattaagttcagtatttcttagctattctttctggtactctttcttttcagcattttgctcaacaggcatcagtgtgtgttgattgttgtcatgtgatcatgtgttctcattgttcagctttcacttataagtgagatcatgtggtcttgctggttttctgtttctgtgtgagtttgctgaggctaatggctttcagcttcattcatgtttctgcaaaggacatgatcatgtttcttttagtggctgtgtcttaggctattttctttggctttgctgtctactttctgttgatttgcagatcttcatttattctagatattgatctcttgtt

SEQ ID NO: 53 - DNA, 6343 bp, Artificial Sequence
  Bisulfite treated of PITX2 A reverse complement after artificially methylated at Cp[AT]
tctgcaaaacagaagagaaggaaggctgtaagaagtggtggttgttgagtgagcagggctcagatgagactatgttacactagctgttaggtgtctactgtgtgctaggcttcaggtgtgtttttttgatctgacagtctctggcatgtgcagcagcatcttcagtctagtcttgggttcaggacatttatttatcaagaggggatctttcttcagagttgttgcaaaagtgttcagaggttagaggactataaagtcacagtgtgctggggaggctgtggatctactttcaagaatcttggtgttggggttaagaactcatctgaatgcaatggcagtgggagtgggtgggtggagaggacttttctctttgggaagctgtatgcaaagatcattcttcagtgcttgttcattagttggagcttggtaaacatttgtagaacatcagtgtcaatgtgtttctgttctagacagcagtttttcttggttttctgtaattctgaaatgaatgggctcttggtctagggtgtttcaggagtgagctgagtttgggtctctcattcatcaggagtcactttttcatatttagtcacactttcttctagagatactaatttggtcatttatttacttactacaaataattattctaaagtatgatttaagattgcagaggagagacactgggtggactgagtgagactgaggagagcagggcaaatgttcttggagggtttactgtttgtcaaggatggagaaatagctctggtataactgctattcagttctttttctttctcttttgggtgagtcaaatctttttcatgttttcaatcacaatgcagtgagtcaagcatttaatgtgctttttcttctctgtcacaggcaagttgggagaggtgggtcttgaggggcttcattgggtgggtagaagagttgtggttgctttaaagacaagaaaagaaggttcagggctttctaggtttctttgatctcagtgtctgtctctcttcatgctaatcagggtatgttgatgattggagggttcactttgtgtgggtgtggggattggggtgggagcaagtgttgttgggttggtggaggcacagaggtggggcagggagctgtgggtctgtctctggtctgagtattgtttttctgtgtcttggtctcttctgaagggagctgggttctggggagtctctggtcaaggttgctgtctacaggaggggctgtttggtgctgtggtgtggggattcagggtggggatggtcaggtggttttttcatttgctagtgagaatgtgggtggggactctgttgatttgattcttgtgggtttgtgggttcagaagtagcagtttggtggcttcagatttagtgattctgcagtaaaatcacaggattagtttctgattgagatgtctgtttgtgagatattacaaaattcattatcacagctttctactaacttgatatgaagtaacacagatgggattttattagttcagacttcaaatgtttacttatgataattttggaggaaatttgcatgtcatcatcattttgataatcttttttttttatatgtctgaactggctgcattattagctggtagttggagcactgcagatggtaactgcaaatagtttttatttatttattttttttaaagaatgaaatatacaaaagaaaaagattgtgttgcttggtgtaaagtcagtcaattattacacattctttttttcacttttttgtgcttcagtgctgaagatcaaacaaagcaatacaaaacaaatcttcaagaactcatagagcttcactctaaggactgaaaagaaggtcaaggtgtgtttcttagctcacttctacatgttcttgtgacttggagatttattttgcagtcaaaatgagtcttgagacttgcatttttatgcttcatttaatgatcaggtctactagaagaactgagtctaaataactggggaagataattttttaaaaagagatcttcaatttttgtctgctgattcttaaacttgttctatcaagacaagtcttctgtgagaaatttggctgtcagactttggaactggcttcaatggctaatctcacaaattgagatgggagactttttctgatgggaggtagttctcattttcaaagttcatgttctagttggaatgtatatgtcaaggactcttgttttggtcaacttgggttttatattgtgagcacacaaaaagcactacatggctaatggaggatgaggaatcatggcaaagcaggcaggcaagttctaagaaataaaacaatttgctaaaaaataatttctgatgactattgcaagactgaaagtgcaggaaaaatacagtttgaataatttcagattctttcacattttttttcttttcatacactttgttatttcataacaaaatctttaatggaaagtttaaaaataaacagcacaggaacatgtgttttaaatgaactaaattgtgaaattagtcagtaaattaatttgtagtaagtaattatttaaggaaattaaaatactgctcagttcagttctgtattttatcatgtgtatgtgttctttacaatcaattaatataagtgctttaggaacatttgaagacaaacatgcttaacttaaggaacaaagcatctaaataatttaagtgtaattttgctgagttaaagtaaaacatttcacaaatgaagtggctatttaattttttagggaaagtttggttattgaaatgttgtatgctcatgttacatcaacaaaaatcttcaatttattttgcttatgtgctttgttttcttgatattattggtatttgaattttagatggatttctgtcaaaatgatattttgtgtgataaaagcatctttagttttgattgatagactaaaacaaatgcaaggaaatttctttaaatcagattaatttttcataaaaatattttagaatgtatgaattctgatatttacatttataatggtaaaagttttttttgtttagtttagtaagacaatactcacacaaaagagtaaaaaaaaatcacatcatcttatgatagtttgatttctaaattgcttaagaaagtaaagtggttaaactggaaaagaggaacatattttggaggtttagaattgaaaatttttttcttaatcttcagctggaaaataattctctgcattcatttaaagtgtatcttctgaagtgtcagattggagttgactggtgatcaatttaaaggagttacaattcaaagaaatggtgagagcttggcattcaggtctggctttcaggtaatttgcttgggtctgagaggtcactaactgtcagttaagatggaatctttttcttttcttttttttttcaatggataacaatgggaagggggctaatctttcagtagctgaaactttgtattcagttctttatcttgagaatgctaattcttggtttgaggatttgtttctgcagtgttggcattgagatttaagggaagatatcttgttttaaatgtcagtcatggtctggcttttctcttgacttcagcattctgtagattgttagtgtctgtggtgggggatgaaaggaacagggctttgcaaggtctgtttgttgactgtgttatcttgggtgaaacttagtttcaaaagtcacaaatcatctatggtgaagattctttgaagtggaacaaattttcagacttgcattatctcacatttctgtgggatagatggtcttcacttattggctattgggagagagctgctgtctttgtgtttcactgctttttggggtgattttcagtgagttgagtctttggctgcatggcaagtgtttgaaagttgggtctgagaggactgcagggcttctgagggtgtcaagttttgaaggagttcatgggtgcactggggtctttgaaatctagttgtcactggcagtttctttctgcttctcttcagctttcttgcttggtcttgcactctctcttctctttctttctctcatttctctctcttttctctgcttctactttgtgtggggagtgatgtgatgtcagcagagatttcatcaaacttcactgcacagtggtgtgtgggtgttggtgagtttgctgtgtggctggtgattcaggagtgagcacagtgtttgggtgagtgttggggggagtgagcaggggtgatgagaaatgaggcaggggagggaagcagatgtcagtgggttgaagagttgggagttggagttgggagagtgaaaggagaggggatctggtggggcacttaggagtcaattgaggagcaggagcatggactttcactgtggaaaggaggatcagaagggaggatgggatggaagagaagaaaaagcaatctgtgtcaatttggcagttctaataaatcaaagggggagtgtcagggcagtggggagacagaaatgtacttttggggagcaaatcaggatgggctgggaggaagtgacagggaaagtggttcaagagatggaacaaaggacaatgttcatggggttgtttgggatgaggtgtgtggagtgtgggtgtgagtgtgtgtgtgtgatcttctttcaggtctgcagagttgaggaaagaggtcacagcaaagagggactgtggagggaggaaagtgagagattggtagagggtgggagtggaggtgggtgtggtggggatgggagaggatgagtgaagagaaatctagaagaatggagtgagctagtgggagagggtgggagggtcacagttgggagtgaatgagctaggcttgtcagctggggaaggttgggatgctgggttcagcttagctgggacattgtgtttgaggtcaaggtgggtggatcaggcatgctgagagtgttggtgcacaggtgggcatggtcatgcactgattcagtgttcatgaagggtttgcactggacaaggctcagatgctcatagagtctagaattttctctgctgtatctacattcaacaagttcattctgggtcatggatatctcattttttaaaatgatgaggttaaggtttctggtgaggatggtattaaattgcatgggatagaagtgggggtgggggagagagtttttctcaagttcacatttgcttctgcaaagcaaagagtatgtgaaattacagggcatattctcacttgaaaagtgtgtcttacttctgaattctgattttctgatttcttgacttgagcaaagatgtgtattttggtagtgagcagaatattttggctctgttctgtctctgagtggaaggactataaatataatttgtctggaggatcaggtgtgaaggcttctgtcaggcatatgggacaatgttttttcaatctcaagggcattctgttaatgtatgtttttggaaagtgttggaacacagtcattgcttctggatttggattttttcatcaatattaatttctgcttgagagcaaaactcaggtttgctattaaaaagacatctctttggtttctaattgagaataaagttttctctaaaagttgtattgctctttctaaatcaatatatcaatacttgcaattttagaaatatatagtgacttgggagaatgtgcataaaatagatatgtttaaaaaagcttggtgcttaaaactaattctagtcactatataggtgctgggctttttctacttttgggggctgtctggaacatgttatgtgttttcttgaattactttgtgttttgaattcatttgagttagcagtaaaaacaggcaaacaaacttgctcaatttgttttgagtgctaaatttcttcactttgaaatagctaacagttgacagatggactcattttatggaaagggttagtctcttcagtcatgaagaaaactgattagagatctacattttaagtcatttctaatcttcatgtaacatttgtgaaaactcaaactttctctctttattcagtggaaactcaaagcagtgttatttaaggggagagaaatgagggggaaaatgttcatgtgctgtttaattgtattttctctctgactctgagaatttctatttctggtttttgaaatcttgttgaggcaagaaaatcaaatttcttcaacaagtttcacaactgaactctagttacaggacattggaaagtgcagtttgagaaagacatcttcatctctgttcattgatgatttttgcagtcttttcatttctctgagtaatgggctaataattctttctttttttcttttcattttgtagagattaagaggtgcttgtagcagaatggtcttgtcttcagctggtggtgaggataggcaatt

SEQ ID NO: 54 - DNA, 9001 bp, Artificial Sequence
  Bisulfite treated of PITX2 B reverse complement after artificially methylated at Cp[AT]
tgtaaagtgattaggagattaggagaatgttgaaacttctgctggaaaaatgcaaagaaaattctcactttgagtcagttgtttacagagtcagtgtgtgtgtgtgtgtgtgtgtctgtaatataaaatggatgtgaatatatatatacaaatagatatggttttgcttttactttaatctgaattatctagataattgtctttattcatcacttgacttcaatgggttcacacaaattaggacatcttatctttttaggcatctaggctgctgctgattttcagtgctttcaacatcttgcacatgttggcactatgaggagcagtcatgtgttcttgggtttttcaatcactttggaggctgattgaggttcttcatacatgtatatttgttgtgatgaaagtttcattggtagagtggagtcatcagagcttttatcaaaattctgtgggtttatgagagatgggtttagaaatctatatggctctgtggggcttcttggctttctaaaataaggcattaacattcaagctttcaaaaatatttgcagctctggggtttgaatcttgaaaaacaaggagtgaggggctgtgtatactaactacagtggagatttttttcattctttaatgtgatggagtttcttcatgaaatgaagctttaaggggcatggtattgtggggatcacagctattctgaggtttaaaagaagaaactggaatatgattagtaaacacattcagcagaaaagagctggattcttattgacttagttataggtcattggctggcagtgcaatgggaggaaatatttactttacacatatactttatgatcttgggggaattagaggaaattcaataagaaaatggctagaaacatttaaaattcttatttaaaagacttaagcaaattagagtcttatcagattaaaaatcactacaaatgtaagagcattgtcttcagtgaaatgctgtggggtctgagaaggagattctttgtcaaatctttgggataaaatgtgtcatttaagcatcagataatgagcagaatgtaaattaatttaatcttctttatcaacaggctgctagtgtaatgtgtataatttagtgataagattgcaggatctaatatagctggatgtatgagtctcagctaatgcagatctgtcacatgaggatgtgttttactctgagcaggtgtctgtatgtgtggaatggggtaaagtggaataaaaggttaaaagcagaaatgctgatttaaagcttactatgaagaaatttctttcttgcagctaaattattcttaaagtgggatgatactggtgaagaaagactgaaaaacaattctcatgtgtgtctttggactgcaagtttaaaatggggaggagttgcagatagggtttgggggtggtcagggcaaaggagagacacataagttgcaaatatatttgtagtctgcttcattcactttgtttcacattgaataagtttttcaatcttgtgaacaaggacaaggagggagtgttttaaagatacttcatgctggcattgcaaatcattgactgtaatgtcaaacaaatacacattcagagatgataacactaacttcatagtaaaacaattgttcatgcagaaattcagaggagattagtttgttctcttcagctgatctatgctgggggacaaaaggactttcaaaaattattttgaatatgtttggatttctttctttaatttctttggaaattaaatttgcttggaaacagtgctataaagagttgatgtcttcaaaggtgattttttttgttttatataaataaggttttgcttttgctagttgagtgcagttctaggctttttgttcttagctcacacacatttcttctgtctgcttggactttaatggctcaagacagtcttgagctcactgggaaaagaaaatgactgttaaaaattattcttgaaattggttatttggcaacattcttaattgtatggaaattcattaaggcatatttcatatataattagctcaaggttgttgattctacaggctttatggatttaaatctgattgataataaagtaaacaagagagttgaatttaaagtgtggctctcttgggttaggatgagcttaatacagtgtacaaggaatttgaaagatctaggatatgtgtcttaatcaatgttaagtagaatggataagctttcagcattttgaaaatgctgggttagggtttctcttctattgtgtgttttctgtctggggactaataagcatcacagagaatgtgatctgaggtgactttttattcttgtataaattcagagtgaatcatcaaacagttgtttgtttaaagtcaaggtaattttcttttgatgggttcatttgcttcttgatttctaatttattagtctgtcttttcagggctctgtcttctttgcaattaaagcttcttcagattagtgcagcattcacttgacaggctgtttggaaaatttaagattggagaggtgatttgttgctgtttttcaaattttctagttttaagtaatgtgtcttctttttatatggggtgggggattggaaatggatgtagtgagacacaaagagtgggtgtcttgttgattcttgtatctttctcttcttgatcatttcactctcttctttcaagtctttgacttctagtctcatctcttcatctttgggtttgtactaaaagttggattgtcttgggctgggcaggagctgaatttttgggagcttgtctgtgtagattcagtgtgcatggtgaggcagtagtttggttttgcactgctgataggtgcaggcaggacagtttcttcattgtggcttggggtgttctgattggtgtggagtcatgtcagttgcatttggagaagggtctgggaggaggtggaggtggagagggctggggagggttgtggtggagtgatgtcttggcatcaggaagtttgtctctggttttaagatgttaggtcaacagggaagtgtggagttgcagatctggtttgttgcttgtctgggtgtctggagctgagctgtggcaaggtttggcttctgtttgattgtttgaggggtgtgtgtgtgtgtgttgtggagggtgtgctcagagggttgtgttgtggctgcagtggctgctgttgttgcaggggatctaatatcatctatctgtttctgtcactcttgacacttctctgtcagggctgttgtgtggggggggggtgggcagagtgtggttggtgttagcttttcttattggaggggttcttgggggagggagggagagaagaagggggtctttgttcactcttgttttgctttggagcttggaagtctgctttctaaagatgctctgagtggtgttcttctgttcacatttcatgtctttgtttgtttgctgactttttgtctttggacttttttgcttgagtcttttggaggagatgggggcagcttggcttgagaacttggtgggggttgtgttttctggctctttttgcagtggggaaactttgtgtctagagtgtgatttggagtgggcagtggtggctatgggggcttggtggggcagtagtcaaggactagtagagtgttgtgctttcttgttcatgaactgcatgaaaggtttgcttcacttggagcattgagcagtggggatcaagctgttggttgtcttctcatctttctgtcatcattttcagttgttagtcatggctttggttctggcttttggtcagttttggttgctggacttcttcaagcacaggctggaggtgcacatcatctttgacatcttcagtttggaggttgcaggtaaggtgttgtgttgttctgcagacatttttgctcagctgctctgtgtcatttgctttctcttgtttcaaggaagtcagtttctttggggggaggtgtggtgggagtggttgtttgtctggctttttgcagaacttttgggagttggaattttgactattttgcatttctttagttctttcttgattggtttggcttctggggtgctaagggtgtgagcaattctgttgttctctctatttgtattctggtctttcttctgttttctgggtcacaaaaatttcagcatcttgatttgaggatcttcagaggttgttgatctctgtttctgtttttctcttggctttcagcttttgaggagcttcacttgttaggaaattgtctgaaatcactcagaaatgttctttgtgaagaggcattttttttttttttttgggaaagggttggtgaactttggtgttcaattgaattttcacatctttttctagtcttttcaaattgcatggaaatctgagctttctgtgagggggaggggggtctgtaaatcatgtgtgtgtgtgtgtttcaggagatttggtgtgtctgtgcagaggtgtataaatatacttgaaagcacaggctataaaagtgaatgtgttgctgcagtgagataaacatgtaaataaaatgtgtggtgctgggggaggggaggaaatggggtgtggacattcacacttgtgtctgcacatttcacaggtgcagtgcttcttgtggtttggagttgttgtgtgcattcttctttggtgtcaggcagttcagctctttcatggcttctgttgttggttcagttggtgtttgtgttgcaggtgggcatgctgatgggaaagtgtgtgtgttttgttttcagagaaagataaaagtcagcaggggaagaatgaggatgtgggtgttgaggatttgtctaagaagaagtggcaaaggtggcagtggactcactttatcagtcagcagcttcaggagctggaggtcacttttcagaggaattgctatttggacatgttcacatgtgaagaaattgctgtgtggatcaatcttatggaagtttgagtttgggtaggagtcagcatggagtctgggagggatggggggaggatgttgtggaggtacaggtcaagtagatcaggagagaatgtggaaggcagtgttgtctgggagggtgttggtggggtgcagctttgcaaaggcagaaggtcttgtggtggtctggttgtgagattacagttttctctttgaggttgacaggactgttgttctggctcaggctttcagagtggcattggctcactgttttgtcattttgtgatctcatgagctgggctgcatgggcaattttctgcacaggacattgtgtttctggcttgcagttgtcagagcagagctaataaaatttctatcaggtcaagagttgtgaacaggcttcaatctgtgagtctttaacaaggaaaatttgtcagagacatggaagagttggttctttctgggaaatctttgttttggttctggttcagctttttttcttctgggcttgtgcttcttacatcttctttatggttgttttggtcattcaggtctctttcacacattctattttctagttttgtgatctttgggagcaaagttttaatacacaactactagttctcttagaaggagaaagaaaaaaagaagaaagacttttctgcttggtttatttatcttctctcaggagttgaactctggaaattgaaactcacattttctcttctaaattataatcatagttttgtaaaaagggcttatcttaactttgtagcaaatctgtactttatggattggcaaaaatgagctcaaataaataattcaatagcaatgttctggtttatgctggttggtggaagatttcaaatttgttaggattctggaagcagaaaacagaatcaagcaaatcaagtggcattcagaggctttgctgttaaaaaaaaaaaattaagtgctctgggtagaaaaaataaagtttttggttagagcagagcaaacaaaaagaagaaaacaatgataaaaagaataaagatcaaaatgctctttcaaatcagagggaatgaagacactctctgggtggcatttgtgcaaggcatgaggctatgctggtggataaaaggttgggaagaagttgaaaatggttttagtttaactgttcagagtcagagctgggttctgggtggtgtggttttgagcaaggtcagtctttcattagctctcttgcacatcaagggaatgggtctctcatgtactcttcttgtctgagcaaagtttagatggtctagggtagaaatggcaagtaattaaagacagagtctatgggttttctgggattctttgaaaatgttctttcattttgtttgctattttgcagcttcattctagtgctttgtagttgtggtgctgggctcttcttgcagctgtctcttctttcagggtggctgcttgttgagtcaagtgggagtgaggtgtgctttttatagcagttgggtgcaaagaggaagggggataaaaaggaaatcaagaatgaaaggaaaaagagaaaaagtggattacatggctgggtttggtggagatgtgtaatgtgaaacatcactggtgtcagcttggatatctcaggtcaggtctctcttcaatacacaaaagttgttgtctggggtgacagggaggtttgatgtggattgggattggggttgtggctgggtcattggacatgggtggaagttggttggtctgggtggttgtctgcaaagtcaaatgatttggctgggtctggtgtgtggacaggtctgtggtgggcttagggtaaagaagaggcagagtgaaagaagggggaatcttcaaaactattctttttgggtttttggagtttaatatgtcaagcttctggagttaatgagctgatgaagaggtggtcttttgctctttatttggttgttttgctaggtgagaaagagtgttggtggtctagtttctgttaagggagcatgtatcagggggtgggggatgacagtggaggtcagggaaggaagggaggaattgtgtgggagaaagagtgattctctagtgttctttcagtttcttcttctcatttgtgggtctgtggctttggaatggaagcaagtttgcaaggtgttttgggaagggttggaaaagtctgctgttttgtgtttgttttacattaagtgtttttggatctggagaaatgtctggctgagtgatcaaattgtttgcaggtcttcatgtgtttggctgaggtttgtggtgtagctttgagtttcagcttgcaggtcagagcagatcaggtcttctgtgcttggtggagatttgggtcagtaactgaaagctggttctggtatcttggtgtgcagggtggtgcagtgaagtgaggtcagggtgtgtgagtgtgctagtgtgtgtgttgggggaaggtgggggttggtctttgatggaagttttagtaatctgcactgtggcatctgtttgctttcttgtttcaattgttttcaggtttggttcaagaattgttgggtcaaatggagaaagagggagtgcaatcagcaggttgagctatgcaagaatggctttgggttgcagttcaatgggctcatgcagttctatgatgacatgtattcaggctatttctacaacaactgggttgtcaagggtcttacatttgtctttctattcatcaagagctttttcttcttcaactctatgaatgtcaattttctgtcatcacagagcatgtttttttcattcaactctatcttgttcatgagcatgttgttcagcatggtgttctcagcagtgacaggtgttttgggcttcagtctcaacagtctgaataacttgaacaatctgagtagtttgttgctgaattttgtggtgttgatgtctgtctgttcttatgtgttgttgacttctttgtatgtttatagggacatgtgtaacttgagtctggtcagtctgagactgaaagcaaagcagcacttcagctttggctatgtcagtgtgcagaatttggtcttcaatctgagtgcttgtcagtatgcagtggattggtttgtgtgagttgcattcacagtgttgggattctaggatcttgttggatggggcaactttgttcttgaaagactgggaattatgctagaaggttgtgggcactaaagaaagggagagaaagagaagctatatagagaaaaggaaatcactgaatcaaagagagagcttctttgatttcaaagggatgttctcagtgtctgacatctttcactacaagtatttctaacagttgcaaggacacatacacaaacaaatgtttgactggatatgacattttaacattactataagcttgttattttttaagtttagcattgttaacatttaaatgactgaaaggatgtatatatattgaaatgtcaaattaattttataaaagcagttgttagtaatatcacaacagtgtttttaaaggttaggctttaaaataaagcatgttatacagaagtgattaggattttttgcttgtgagcaagggagtgtatatactaaatgtcacactgtatgtttctaacatattattattattataaaaaatgtgtgaatatcagttttagaatagtttctctggtggatgcaatgatgtttctgaaactgctatgtacaatctattctgtgtataacattttgtacaatattattgttttacttttcagcaaatatgaaacaaatgtgttttatttcatgggagtaaaatatactgcatacaaattggtctggattctttcttttcttctctgtcactaacttggtcaggacatctcagtcactgctttctaaacaaatcagttttctctgtctgtctagttaaacatacaaggcagcagttcttatttaaatttggtagaaataaatgatagtcattcatcagaaactaaaaagaaaaaaaaaggcatttttgggggggaaaagggctacaaaatctaattttgtctcttcaatttttctttggcttaaatctagaggatttcattatggctagcaaataatatgaaaaagaaaaaagaagaaagaaatttagcaagttcatcagct

SEQ ID NO: 55 - DNA, 1920 bp, Artificial Sequence
  Bisulfite treated of RASSF2A reverse complement after artificially methylated at Cp[AT]
tgcagggttggggataggcatgtgagggggagaactctgagtagatagggaatctgcagttgggctgctcaagggtctctgtgtactgggggtgtcaggaggttcagggatggaaaagggggaggtgagaaatggacaaagaaacttggtcttcttggcattgctgtcatgtctggttggtttgtcaagttgaaggggtctgtttagtttctgtttggctcaaattcttttgggaataagctgggatgttagaaaaaacaaaatttcacaatctctgtctggggaattcaggttgctggaggtgggcttggtagggcagtgtgactgttttctgggagtggctgtcacagctttgggtgaattgaggagcttgggtcaagtcttcatttctcttggagagggcagcagcaaggaggtgaggggagtcagctcattcttttcaattctgcacttttttttcatcttttcattttcagtttggaagaattgctggtggtgggagtctggatgagctggtggggaaggggatgcagtcacagcattgtctgggagggaggggagaagctttgtttctagaggggaggggagaagaggagggggcaggagacaaggggaggaagaaaggtgaaggcaaggtgaaggggtggagagtgatatgaagagtgagagaaaagagaggacagtggatgagcagatttggtaggggctgaaaaaggtcaaggggctggagggagggagaggaaggaggaggggagtgaggagggtggggtgtttggttttcagttgtgtggtcattgtctgttcagtctggctggatttgagtttggtttgttgattgctggttgaggtgcagctgaagcagtttttcagttgtggtgttttcacttttcaacttcatggtttctgtggtgtgggtgtgatgcagctggtttggggtgaaggcaaggtgtggggtgtggggtgtggggcactgggagtgaggcactggtgtgggatgtttggtgcaaggtgcagggtgtgggttgctctctttttgtgttttttcatcttgtcaaagttttttcatgatggtttctattttggctgggtcagttttgtaattcttgtctgtctcttgtcttctcttttctttttgagttgtggggcttttggggtgtgtggatttttgtcaggggttgtgtaggtgtggagtttcagttggtctgtcttgggtttgaagaaagttgtggcttggagctagttcttcttctatgatttctgggggtgttctttcttctttttgagtttgtgatgggaaggtgctttcatttcatttttggggtctctgagactttctggtgaggtggggtggtgtggcaggtgcagggctggggagggtctgacagttctggagagtgtttgatttcagtttgttgttgtcttctaggtggatttttcagaggcaggtttcagtttttggtgtggggaggtggtgtgcttcagaggggtgcagggtgtgtgggggttgttggttctttgggcactttttctttgtggtctttttgttcttctttggagctggtgtctgaggttgctgggatctcagtctggtgtcttctcttgttttgagtgaggcaggtgttgtgggtggttttggctacttctgcattttgagtgcttactttgcattcagctctaagttggagagctctggggacagttgagagtgtcagtggtctcatagggagactgagggttctgtttcatcttgggtgttgtgtgggtctgggctgttcacagcatctctgtgtctcagtgataggagaagtcaagtgtgaggtctctcaacagctgtgtgcactctatttttcaggtatctggaattttggtgtctagaatgtgttttttgggagagcaaaggctgtgtctatggcagtctgg

SEQ ID NO: 56 - DNA, 5473 bp, Artificial Sequence
  Bisulfite treated of SHOX2 reverse complement after artificially methylated at Cp[AT]
tttcatcttctgtttcattgatgtgttattattgggggggctggagcagtaaaaaaagaagaaggaaaaaaagagtggggctctgctggcagaggttgagtgttgggctgatgtgtggtggtgatggaagaacttatggtgtttgtcttcaagtcttttgatcagaaagtgaaggagaagaaggaggtgatcatgtattgggaggtgctggagagtgggttgctgtgtggggtcaaggagttgattggctgcattgaggtgggttgtgatgattgcagcagtttggcagtttgggtggttggtggaggtggtggtggaggaggtggaggtggtggtggaggaggtggaggaggtgtaggaggaggaggagcaggtggaggagctggaggagggtgctcttttgtttgggagctggacatgggtgttgttgagagaagcagggagttgggcagtttgtgactgatggagggtaatgatctgactgatttttggcagtggtttttctttttgtcttttggacttctcttgggtgggagaggactttgaggttcagtggggaggggagagggacatggagagggttctggatttcagctttgtcagctagagtgatagtggaagggtgggggtttggtggtatgcttggtcatgggtggggttctagtgtgttgtgggggtggtgtggggggaagtgtgtggggtttgtgtgtgttcttttcagatgttttcatttcattgaaatgcatttttcatcagtgggaggatgggtttgcagtttggatggtttgcaggtggatgtggaagtttgtggggttgggctgcaggagggggtgctgaatcagatggtgggactaaagctagtctctagtgcagagtttgttgggagggagaaggggcagaggtggaaagcttaattctttggttgtctaggtgtttggggttgtcaagatttcttgaactttgcagagtttctgaatctttggatcttaggggtcaaaacttttcattctctttcaaggtagaaggaagtcaatgaaagctgaggttcaggctatgctgcttcttttgggtgaggtgttttggtttcttggtgtgttgggggtggggggggggggtggtgggggaggtggggatctatatttacacaatttctttagtgttttcaatcattcagtacttggttctcttagagcaaaaattctttggtgctagctcagtgttaggaaatgtctttatctcaatggcagagtgttctatatcaattcaaaggagttcaacaataaaattgatttggcacttggtgtctgcagtaactggtgtactgtcatattttttcaattaagaaaatatgtggcatgtgtggaatcacatatttaagcaagcaattaagttgtttatgacatggtctgtttctgtttagatcagtaattggaaatttggggacaaaaatagagattttattaagtctatggatcaacttgaaatttggacatcttcttgaagtttcaaaactttgagtggcattcactgtgtagatgacatgtaatagacaaagtcttttcatctcattggcagaatttgaagggtgtgttttcatatttaaatttcaatacaatatcagtaaaaatactttgctattaaattggttcataatgtttactataatgtttctttctaaagaaaggacaaatgttcacaaaactaactctgagaactagaaaatatggcaatatttaagatcattgtagctagaatgtttggcagggttgagatctagtgactcttctttcttcaaatcagcatcaggtctttctaaatttgtaaagtggtggagttattgtcaaggtgttcagtgcagtcttttggtcatgagttcacaactacaggtttgaactacaggtttgtcagtgtgtctgatggtgaggttcaggtctgaatttttggtgggtgcagtttctgggattgttgattttcaagctcagggcaagtattaatttctctgcagattggctcttttggaaatgatttttaacattcatgctggtctggattctgtgctgggaagaactgcaaacagtcttgactatctaaactcagctttgacttcttaaaatttggagtctctgatttgggtgcagaggataaaggtttcagggggatatatatatggtggctgtatatgctcacactagaagagcttctgtttttaaagggaggagaaggacaggaaagtggcaatggatgtgtgcaaattcagagcagaaaaattcatattttattaaacatttgagctgctggttgcatgaaaaggctttgagcaatcaatagaaattgaggattgtgaatattttgcttgaatctgttgatctctgtgggttaagtgtttagggttgagtctgtgttttcatgagggagggtgaagagagaacagaaagagtggttgcttttgtttgtcattggaggctggttttttgtcttctgtcttctggtttggcttgggtggtgagttctttgggcagtcaacatggtgtgggtgtctgtgcttgtgtgattttggttgggcaggtgggatggagattatctggctgttcaggggatcttatgcagggtttggtttgagttcaggggcagtgaggggtgtctgtggatgtggctttctgtgtggcacaacattggggtctgttgctcttgctgatatcttttggttcaattgtttctaaattagatcagcaagtttgtggtaggcagagagtcagtggtggtgagagctggtctgagaatgagtcagtcttctgggaatggttggtgtgagaggtcagtgggtggtcttgttgtgttcttatgttcagactttgctctgtgagaggtctggtgctgtgtctttgatttctgtgagtgctgtggagcaagtgagtgtgaaagtgagtggaaatcatttggtgtttgctggggaaggttggtgactggggggtgaatagtgaggtggtgagttgaggtatgtttgtgaaggaggtggtggatgactgttcatcttgtttcaggtggttgctcagacttgatctttgtgcttctttgggatattctttctttgggtgggttgagaagttggatcaggatttcatgagggggaaggattctctattcttttttgtgacaaatctggtaacaggatttgctgtgctgtttttgtttgtgtgtgtgtgtgtgtgtgtgtgtgtttgtgtggatgcatgtgtggttttgctggggtgttttcttcagtgtttttggagctgaaagattgcaaagaggatgtgaaagggatggaggatgaaggtcagatcaaaatcaagcagaggtgaagttggatcaatttcattctggaacaactcaatgagctggagaggctttttgatgagattcactattttgatgtcttcatgtgagaggaactgagtcagtgactgggtctgttggaggtttgagtgcaggtattcagctgtcaggaggttgagggttcagggagcagagagagtctggggttggaaagaggcttgggggacacacttgggaggtggtgcttctagtgtctggtgtaagatgagaaggaaagagatatctttactagaggtcttatttttcaaagtagatcttagttctatagcacttttcttctttttttttttttcattctaacatatgttttcagaagaagaaagctgtgctgggctttctttcagagtttctataaatcacatttttcttgtcttgcactggctttaatgtggtttaattctaatgggtctacttttataaggcttaaaaaaaaatttcacagaaaatgttttatctctggatgtcttaaaagtttcaaagagtattttgttctctggagttggattttcttgaaagtctgctctgcagggtctaggtttgtcaagtggatatttcaattaggtttatagatgtgcagactataaagaaaattagtaactgttaagtgcagaaatttacagtctgctgttagtggttgatctcaaactgtgtgtgaaatagtggagaaataaatgcattttggtcactctttgttcattcatttaatcaaggcaatgaaactgattctaaatacattagattttaaaacaaatcacatatattagtatttatattttcaaagtctgttcttcagcatgtgtcatattcaatgaagttaggactgaaacagattttctttattggttgtggaggcaaatgtaatagcaaaaataggctttgggggcatttaaaggagcaaattgtgtacattcacatacacatattcttctagctttagggggaacaaatttaaatgtttcagattgtatttttgctcagataataaaatagaataaaatgatagttattattggtttgaacacatggagcagttttaggtttgcacatctgcagctgttacaaagtattgctgtaacagatactcttttggtctctgggcacagagatcatcatctgtagtgaactatgcacaattcttaaggggctttttcacatcttgtaacaggatcaggaaaaaaaaaaacagagcagtcatgttgaagaggaaaagtaataataggctgtcttggtcatcacagcatcagcagcagagtctttctttttaagtctcttctgctttgctctgtgcactgagatcttcagaggctcagcaatttcttaaaaacatgatgataattattacagttatgattattagtatcttaatttcaactcttctaggggaaaaaaaggcaagaagtctcaggtcatgtgaattacacaaaggatgtcattctggcacaaaattcattctctgttgtactaaatagcagagaaatttttgaagatttacattgactatgacacttgctttcaaaaacatatcaatgaaagctctgaagcagtatttttactttaatggggttttaaaaactttaatttgtgagtcaatcaatatgctttattattgaaagtggaatacaaaagcaagctttatttgaattttaaaaaatctgtcatactgtctgtaaaagttgtcaagtttaagcaggtaacattcaggagaacaaagtatctaagagttacttgctttatatatacttcattcttcttttgctgagtgctcttctttttttctcttaagaagtgaactttattgttgtttcatacttttatttacattttagttattttctagatgtttttctactattctaactgcaaacagtggctttttctaaagaagcaaattagattatcatgataatggtgcacaattattctgctactgtgtttcactctgctgcacagcagaacagagaaattctaaacttctttgtagtgaggcttttatgacactaattatctcttttcaattcttacaacttcttctttgcaaaggagtcattatttgctctggtgtttggtttttctttaagatgaagctaattaacattat

SEQ ID NO: 57 - DNA, 1405 bp, Artificial Sequence
  Bisulfite treated of Septin9 A reverse complement after artificially methylated at ggcC, agCt, Ccgg
gtgggtggtgttttgagtgtaaaatgtgaatttgagttgttaagtttgggtgttgttggatggttttatttggaggtcgttttgtgttttattaagtagaggagaaattgaagagaatttgaagaaaggatgttgtggtctggattattagttttagaggttgaatttaaggatatttttttatttagttttgattttatttatttatatagatgtatagggatttaaagtatctggtcgatttggaaagttagtgatttttgtgagggtgtaaggggtgaggaagagggagtgttttttagggtagtttttttgatatttgagtaagggttggagatagtgtaggggatggttggtttaggttgaaagtggtctgatagtggtcttgttttgggaggaatttgatttgtagtgtgtttgttgtggggatttgtttagctctgggggtgttttgttatttctggtcgtaggtatttaggtgagtagtgttggttctgggatattgatttttttttattctgggtgtgaagtttatttgagtaagatttttttatggtgtttttgtggtcgttgtttttaggaaagtgtggtggtgaggtagtggggtgtgtgtttttagggtgttaattttgggccggtagtaggaaggtgggaagagggggtggtctgttgtttggagtgtattgactgggtcttgttctggtcttgtttttgttttgtttttttctggagatgtgtatagaattctggtctagctggttgtggttttgtttttgatttgttttttttttgttttgtgaatgtgtgtgttgagttttatttttgtttatttttgtgttgtgttgtatttggtggagtggggttggtgggtgctgggtctgggagggggtgtttttgtgtggtagtgtagattagattagattaggtcaggccgggggtgggggtcgtttgtgtggtctgttgtgtttgtagctttgtatttttagctttttgtgttggtgttaatggttggttctgggagttgttgtattttttagttttgagtctgggtggggtgggtctggtcaggtggaagtgggtggaggtgtgggtgttctgggtggtcttgctgggtgaggtggtggtgctgggtattgtggtggtgctgggtatagctgggggttggagctggggtgctggtttagtgggccggggtagggtgggataggatatttgttttgttatttttttggtaattaaaagggtagagtgtgttgattgagttggagttttagtttttttatttgtaaatgggtgtgttggatagatgattatttgttttttttgtgttgggtattgtgtgtagcttggtgtattggtgtagtggggtagatatagggagttgttttttataatttgggtaatg

SEQ ID NO: 58 - DNA, 2365 bp, Artificial Sequence
  Bisulfite treated of artificially treated Q9HC74 at ggcC, agCt, Ccgg
gtatgtgtttaaagatgtttagatgaggaggtgttgtgggggaggggggtgggaatagtaagtttttttagctttgtagatttagattttttttttttttgggaagtagggatgtaaagggatagagtttgaaaaagggtttttattattaagctgataaagtaattatgatgtttttagcttatattttgtatagtgttagtggtcattggattataatttttttttgtttttttgttgttttatattttttttaggtctagttttgaagaatagttattggtattttgtttggtgtttagttaaagttttggttttttaggaggtcttgttttttttatttagatagggttgattttaggtgggtcgtgtgggtagctgggtttaggatatttagatgttagttttggttttggtcatggagtggggaggattttaggttggttattttttagcttggtctgatatttggatagtttgtttattttaatatagttttttttttttctggtctattagagggttttgtttaagttagtttaggagtttttttgaggggtgggggttttaggttctggtagaggtaggtctgttttttagaagttttgttttagagtgttggagattattgtgtgagctttttttttgtttgttgtatttatttttgtggatgtaggatgtagagttttagtactggtagttaagaggatgtaggaaagtgtatgtatttataggtttagagatgtggatgttagatttaggtttggatagagtagttttgtaagttttaatatattttgtaaattttgaagataggagagagttaaaatattttttttgtttgtatgtaggtcttttttgttttttatggtctgattttgggaggtggatgaggatatttttaggtctggatgggggtcatgggatattttattttagattttgttatgatttgggttgtgtttgtttggtgtttctggtctatgggttgtataatttggtggtcttgaaattggtgtgggggaggggagggttgtttatttgagtaggatgtggttgtttatttagttggaggtgaggaatgatttttttattttgttgctgggtttaagtggggtctgagagttgctggggagagttaaagggaggggattgatggattttttagagtgaaattgtgtgttttggagagttttgaggtagttttgtgagtttttgaggaggttgttgttgtttggtaaatataaataataataaaaggaaggaaatttaggtggtagtgtgtagaatgagtatagggttttgtgagggtgtgtagggtttatgtgggtgtttttaatagggttttttatgtaggtggtgtgggtatggggccgggggtgtgtggtgtttttagtgggagggtgtttggattaggggttttgtttttttttagtgtatttttgtttttttttagtgtatttttgttttgtgttaggtctatttgtagggttttttttagtatgtttgtggtcgtagtagttagtttagtatttatttttgaagtttgaaatgattttatttagctgtgtgttgattgtggggtttgatatgatggttggtgggtagtgggttgtgtggagggtagtggtgaggaagtgtttctggtggggtctgggtcttgtgtgttggttggggtgttgtgtttgtgtttttgtagtgtagagctagttgctggaggagtttttaggtcttttggtttagctgaatgaatgggggaggaaggtgggtgctggtctttttttgtgtgttgtgtttttgttttgtttttgttttctgggtggattaggtttttgtatttgtactggtctttttgttttgtattggttgttttgtttgtttgttaaggtcaggtctggggggttggggtctgagtggtcgttgggggatagttttgggtatatgactggagtgttttttttttttttgtttggtctgtgtttaggggatggtgagagatgtggtcttagtttttttttctgggtgttttgttgtggtcagatgtgggtggatgtggaggccgggtcatggtgaggagggtgggtgtttagaggggaagagatttttttttttttctgggtgtagggtttttttgtaggaggttgtatttgggtagttaaataaagttttttgttattgttgttgtgtgttttgtgtttgtaagggttaaatggtagtgtatgtggttggtaggtaggattctggtctgtgggtttaagagttgaggggtgtagggtgaatatgtgagttttatggtattagtgagaggtcattaatttttatttattgagggtatttttgtagctaatatttttattatgattat

SEQ ID NO: 59 - DNA, 4261 bp, Artificial Sequence
  Bisulfite treated of GSTPi reverse complement after artificially methylated at ggcC, agCt, Ccgg
tatttttttttgttttttttttttttttttttttttttttttttagtttgtgaggtttagtaaatatagttaggttgagggttttaggaagttattgattgtgttggaggagctgttttttagttttttgttttgtttttttattgattttgaggttgagaatttttaagttttgttttaggaaatatagtgtttatagtagcttttttagaaattttattggttttggagaaaggaaggtaaattttgttttttgtttagagtttttttaatttttattgttttttgttgttattgatggggaggtttatgtatttaggggaggtcaggaaggtcttgagcttgggccgggtattgaggtgttttatatatgttgagagtagggggaatgtatttaggtagttaggggttaggattttatggattagtagtaagtttagtaggttgtagttagtgaaggagatttgtagggtaggggggttagggatttagttagtgggagtaggttggaggaattgggggtagagggtctaagtttattttttaggtttgttttgttttgttaaataaatggtttatatttgtgtttatttggaagtagagggtggtgaggaaggaatagtatggggtcagatgtttatttggttttttataatgaaggttttgtttttttggttttgggatagtagggttttaaaaggttttagttgtctgggtagtgtttttatatagttatttttgtttgttttttgttagatattattatgtattattttatttttattttttttagtttttgagatatttttgtttgttttaggtcagatattagagttttagatttttttttgtttgttttttataattaggttagtattaaattttgtttattttagctgttaatttatttttattttattttgtttgtttatttttgttgggtttttttattagatgattgtaaaagctttagagctggtttttttggaggatttttttagattttatatttagatatagttttgtttagattttttaatggtctttattgtttttaggagattttaaattagtgggtttaaggtctttgggatttgggtctattgtttgtttatttttatttttttatttatttgatataaatgtaagtgtatatatatatatgtatatatatgtatatgtatgtgtatatatgttgtttttgttgaattggttttaggtttttaaatgtgttttgtgtttgtatattttttttagctaaaagtgttagtatttttatttagaaattggtgataaatttttttttatttttggttattttaggaagtttttgttattttaggagattagaaattattagttgttggaggtttttgtttttgtatttgtttttatgatttgttatttggttggttgatgttttaggtaataagggtgtaggttgtgttttgttttaggtctttgggtctttggtctagagctgatttagtttttgtattttgatttaagaaggggttagtttaagttatttgaggggtaaggggggtgagggtataagaagtttttttttttgtttagtttttagtgtttaattttggtgtagatgtttatatagttggtgtagatgagggagatgtatttgtagtggaggttttttatgttgttatttattatgtttattagggttgttttttgttggttttttttatagagttttggggttgggtggaggggagtaggtcgtgtgattgggtgtttgattaatatatagttattggggatgggtcaattagggggttgtttgtgagttttagtttgggaggaggggaagaggatgtgtgtggaaggatgagagattgttatatagtaggtgtttagagcttatttgatatttgggaggtagtttggtatagggtaaggattgtaggtatttaggtttgattttgggtaaattatgtaattttagtgggttttagttttttttattttagagggttgtggggtagctgatttaaataaaagggttctgggggtagaggtttgtttatgtttgttttggatttggaggtttaagatttattaagggtgtggtctaggtgatgtaggatggtattggattggtatagggtgaggtttttgttttggaatttggggagctgtttgtatagctgttgggggaggtatggtttagggaggggtattgagcttgggtgttttttgattttagttatagttttttaaggtctagtattttttttttttgtctgggtatggttatttatgtaggaggttttgagtgagtttttttgttatgtttttatggttattattttttttttttagctttggtcttgatttgttagtagtatgtgtagggtcgtgtagtggtctgtggggagggagaagtatgagatgtggggactgggtcgattttgttttgtagtaatctggggaggggttaggagtgtagggagggaataggtaaataggtttttttgaagattttatataatattggggtggggagtaggtatggtgggagaggtggggaataggaaggaggtctggggtaaaagttatatgatggagggataagggggtttggatttttctgggtgggtgaggggttgtgggttgtagttttagtttttgttttttttttttgttagatatatgtttttattttgaattgggaaatagattatggtgtagggtggtattgtagtgaataaagaaaagtttgttggagtctgggggaggatgttaaggtgtggtgagtgtagtttgttttttttttttgtttctggggttttatttttttttgaggtgttctgggtcttttgaaagttgttaatggtattggggatgttttgggttttttaggtctttgttctgggttttgaggtgggtgaggagttttgctgggagtctgggtctgatgttgtgggttggtcttatgttgggagctttgagttttatttctggggagtgggtcgtgtgtatttattggtggtgaagattgtggtggtgaaattttagtgaaggtcttgtggtctttgagttttataagggtggttttgttttgttttgttttagtgttgagttatggtgctggtcgtttttttggagggttttgtggatttttgctggtcttagttctggtggtcgttgtattctgggtgttggtcgtagaggggtgttttggagtttctggagttgttgtgtagctggccggggaagttttttttttttttttaggtttttagtggggtctagggagtaaatagatagtaggaagaggattgtagtgaagtgtgtgtagtgaattggtgtgctgggatattgtggggggaaattttttaagattgttgtgattctggagcttgtatatttgttttatagggtaggggagaggggtggaggtcgtttagaggaaaggaaattgttttattttattttattttattttattttattttattttattattttattttattttattttattttattttattttgtgttattttattttattttatgatgtagttttatgttgtggtctaggttggagtgtagtggtgtgattttggtggtttattgtaatttttgttttttgggtttaagtaattttgttttagttttttgagtaggtggaattataggtgtgtgttatatttggttgatttttgtatttttagtagagatggggttttattatgttggccgggttggttttgaatttttgattttaggtgatttgtatgttttggttttttaaagtgttgggattataggtgtgagttattatgtttggtcgtttaatttttatttgaagttttggggtatatgtgtaggatgtgtaggtttgttatataggtgtgtgtgttatgatggtttgttgtatagattattttattatttaggtattaagtttagtattttttagctattttttttggtattttttttttttagtattttgtttaataggtattagtgtgtgttgattgttgttatgtgattatgtgtttttattgtttagcttttatttataagtgagattatgtggttttgttggttttttgtttttgtgtgagtttgttgaggttaatggtttttagctttatttatgtttttgtaaaggatatgattatgttttttttagtggttgtgttttaggttattttttttggttttgttgtttattttttgttgatttgtagatttttatttattttagatattgattttttgtt

SEQ ID NO: 60 - DNA, 6343 bp, Artificial Sequence
  Bisulfite treated of PITX2 A reverse complement after artificially methylated at ggcC, agCt, Ccgg
tttgtaaaatagaagagaaggaaggttgtaagaagtggtggtcgttgagtgagtagggtttagatgagattatgttatattagctgttaggtgtttattgtgtgttaggttttaggtgtgtttttttgatttgatagtttttggtatgtgtagtagtatttttagtttagttttgggtctaggatatttatttattaagaggggatttttttttagagttgttgtaaaagtgtttagaggttagaggattataaagttatagtgtgttggggaggttgtggatttatttttaagaattttggtgctggggttaagaatttatttgaatgtaatggtagtgggagtgggtgggtggagaggatttttttttttgggaagctgtatgtaaagattattttttagtgtttgtttattagttggagcttggtaaatatttgtagaatattagtgttaatgtgtttttgttttagatagtagttttttttggttttttgtaattttgaaatgaatgggtttttggtctagggtgttttaggagtgagctgagtttgggtcttttatttattaggagttatttttttatatttagttatatttttttttagagatattaatctggtcatttatttatttattataaataattattttaaagtatgatttaagattgtagaggagagatattgggtggattgagtgagattgaggagagtagggtaaatgtttttggagggtttattgtttgttaaggatggagaaatagctttggtataattgttatttagtttttttttttttttttctgggtgagttaaattttttttatgtttttaattataatgtagtgagttaagtatttaatgtgtttttttttttttgttataggtaagctgggagaggtgggttttgaggggttttactgggtgggtagaagagttgtggttgttttaaagataagaaaagaaggtttagggttttttaggtctttttgattttagtgtttgtttttttttatgttaattagggtatgttgatgactggagggtctattttgtgtgggtgtggggattggggtgggagtaagtgttgttgggttggtggaggtatagaggtggggtagggagctgtgggtctgtttttggtctgagtattgtttttttgtgttttggtcttttttgaagggagctgggtcttggggagtttttggtcaaggttgttgtttataggaggggttgtctggtgttgtggtgtggggatttagggtggggatggtcaggtggtttttttatttgttagtgagaatgtgggtggggattttgttgatttgatttttgtgggtctgtgggtctagaagtagtagtttggtggttttagatttagtgattttgtagtaaaattataggattagtttttgattgagatgtttgtttgtgagatattataaaatttattattatagctttttattaatttgatatgaagtaatatagatgggattttattagtttagattttaaatgtttatttatgataattttggaggaaatttgtatgttattattattttgataattttttttttttatatgtttgaattggttgtattattagctggtagctggagtattgtagatggtaattgtaaatagtttttatttatttattttttttaaagaatgaaatatataaaagaaaaagattgtgttgtttggtgtaaagttagttaattattatatatttttttttttatttttttgtgttttagtgttgaagattaaataaagtaatataaaataaatttttaagaatttatagagctttattttaaggattgaaaagaaggttaaggtgtgttttttagcttatttttatatgtttttgtgatttggagatttattttgtagttaaaatgagttttgagatttgtatttttatgttttatttaatgattaggtctattagaagaattgagtttaaataattggggaagataattttttaaaaagagatttttaatttttgtttgttgatttttaaatttgttttattaagataagttttttgtgagaaatttggttgttagattttggaattggttttaatggttaattttataaattgagatgggagattttttttgatgggaggtagtttttatttttaaagtttatgttttagttggaatgtatatgttaaggatttttgttttggtcaatttgggttttatattgtgagtatataaaaagtattatatggttaatggaggatgaggaattatggtaaagtaggtaggtaagttttaagaaataaaataatttgttaaaaaataatttttgatgattattgtaagattgaaagtgtaggaaaaatatagtttgaataattttagatttttttatattttttttttttttatatattttgttattttataataaaatttttaatggaaagtttaaaaataaatagtataggaatatgtgttttaaatgaattaaattgtgaaattagttagtaaattaatttgtagtaagtaattatttaaggaaattaaaatattgtttagtttagttttgtattttattatgtgtatgtgttttttataattaattaatataagtgttttaggaatatttgaagataaatatgtttaatttaaggaataaagtatttaaataatttaagtgtaattttgttgagttaaagtaaaatattttataaatgaagtggttatttaattttttagggaaagtttggttattgaaatgttgtatgtttatgttatattaataaaaatttttaatttattttgtttatgtgttttgtttttttgatattattggtatttgaattttagatggatttttgttaaaatgatattttgtgtgataaaagtatttttagttttgattgatagattaaaataaatgtaaggaaatttttttaaattagattaattttttataaaaatattttagaatgtatgaattttgatatttatatttataatggtaaaagttttttttgtttagtttagtaagataatatttatataaaagagtaaaaaaaaattatattattttatgatagtttgatttttaaattgtttaagaaagtaaagtggttaaattggaaaagaggaatatattttggaggtttagaattgaaaattttttttttaatttttagctggaaaataattttttgtatttatttaaagtgtattttttgaagtgttagattggagttgattggtgattaatttaaaggagttataatttaaagaaatggtgagagcttggtatttaggtctggtttttaggtaatttgtttgggtctgagaggttattaattgttagttaagatggaattttttttttttttttttttttttaatggataataatgggaagggggttaattttttagtagctgaaattttgtatttagttttttattttgagaatgttaatttttggtctgaggatttgtttttgtagtgttggtattgagatttaagggaagatattttgttttaaatgttagttatggtttggttttttttttgattttagtattttgtagattgttagtgtttgtggtgggggatgaaaggaatagggttttgtaaggtttgtttgttgattgtgttattttgggtgaaatttagttttaaaagttataaattatttatggtgaagattttttgaagtggaataaatttttagatttgtattattttatatttttgtgggatagatggtctttatttactggttactgggagagagctgttgtttttgtgttttattgttttctggggtgatttttagtgagttgagtttctggttgtatggtaagtgtttgaaagctgggtctgagaggattgtagggtttttgagggtgttaagttttgaaggagtttatgggtgtattggggtctttgaaatttagttgttattggtagtttttttttgtttttttttagcttttttgtttggttttgtattttttttttttttttttttttttattttttttttttttttttgtttttattttgtgtggggagtgatgtgatgttagtagagattttattaaattttattgtatagtggtgtgtgggtgctggtgagtttgttgtgtggttggtgatttaggagtgagtatagtgtctgggtgagtgctggggggagtgagtaggggtgatgagaaatgaggtaggggagggaagtagatgttagtgggtcgaagagttgggagctggagctgggagagtgaaaggagaggggatttggtggggtatttaggagttaattgaggagtaggagtatggatttttattgtggaaaggaggattagaagggaggatgggatggaagagaagaaaaagtaatttgtgttaatctggtagttttaataaattaaagggggagtgttagggtagtggggagatagaaatgtatttttggggagtaaattaggatgggttgggaggaagtgatagggaaagtggtctaagagatggaataaaggataatgtttatggggttgtttgggatgaggtgtgtggagtgtgggtgtgagtgtgtgtgtgtgatttttttttaggtctgtagagttgaggaaagaggttatagtaaagagggattgtggagggaggaaagtgagagactggtagagggtgggagtggaggtgggtgtggtggggatgggagaggatgagtgaagagaaatttagaagaatggagtgagctagtgggagagggtgggagggtcatagctgggagtgaatgagctaggtttgttagctggggaaggccgggatgttgggtctagcttagctgggatattgtgtttgaggttaaggtgggtggattaggtatgttgagagtgttggtgtataggtgggtatggtcatgtattgatttagtgtttatgaagggtttgtattggataaggtttagatgtttatagagtttagaattttttttgttgtatttatatttaataagtttattttgggttatggatattttattttttaaaatgatgaggttaaggtttttggtgaggatggtattaaattgtatgggatagaagtgggggtgggggagagagttttttttaagtttatatttgtttttgtaaagtaaagagtatgtgaaattatagggtatatttttatttgaaaagtgtgttttatttttgaattttgattttttgattttttgatttgagtaaagatgtgtattttggtagtgagtagaatattttggttttgttttgtttttgagtggaaggattataaatataatttgtttggaggattaggtgtgaaggtttttgttaggtatatgggataatgtttttttaattttaagggtattttgttaatgtatgtttttggaaagtgctggaatatagttattgtttttggatttggatttttttattaatattaatttttgtttgagagtaaaatttaggtctgttattaaaaagatatttttttggtttttaattgagaataaagttttttttaaaagttgtattgttttttttaaattaatatattaatatttgtaattttagaaatatatagtgatttgggagaatgtgtataaaatagatatgtttaaaaaagcttggtgtttaaaattaattttagttattatataggtgttgggttttttttatttttgggggttgtttggaatatgttatgtgtttttttgaattattttgtgttttgaatttatttgagttagtagtaaaaataggtaaataaatttgtttaatttgttttgagtgttaaatttttttattttgaaatagctaatagttgatagatggatttattttatggaaagggttagtttttttagttatgaagaaaattgattagagatttatattttaagttatttttaatttttatgtaatatttgtgaaaatttaaattttttttttttatttagtggaaatttaaagtagtgttatttaaggggagagaaatgagggggaaaatgtttatgtgttgtttaattgtattttttttttgattttgagaatttttatttttggtttttgaaattttgttgaggtaagaaaattaaatttttttaataagttttataattgaattttagttataggatactggaaagtgtagtttgagaaagatatttttatttttgtttattgatgatttttgtagtttttttatttttttgagtaatgggttaataattttttttttttttttttttattttgtagagattaagaggtgtttgtagtagaatggtcttgtttttagctggtggtgaggataggtaatt

SEQ ID NO: 61 - DNA, 9001 bp, Artificial Sequence
  Bisulfite treated of PITX2 B reverse complement after artificially methylated at ggcC, agCt, Ccgg
tgtaaagtgattaggagattaggagaatgttgaaatttttgttggaaaaatgtaaagaaaatttttattttgagttagttgtttatagagttagtgtgtgtgtgtgtgtgtgtgtttgtaatataaaatggatgtgaatatatatatataaatagatatggttttgtttttattttaatttgaattatttagataattgtttttatttattatttgattttaatgggtttatataaattaggatattttatttttttaggtatttaggttgttgttgatttttagtgtttttaatattttgtatatgttggtattatgaggagtagttatgtgtttttgggttttttaattattttggaggttgattgaggttttttatatatgtatatttgttgtgatgaaagttttattggtagagtggagttattagagcttttattaaaattttgtgggtttatgagagatgggtttagaaatttatatggttttgtggggttttttggttttttaaaataaggtattaatatttaagcttttaaaaatatttgtagctttggggtttgaattttgaaaaataaggagtgaggggttgtgtatattaattatagtggagattttttttattttttaatgtgatggagtttttttatgaaatgaagctttaaggggtatggtattgtggggattatagctattttgaggtttaaaagaagaaattggaatatgattagtaaatatatttagtagaaaagagctggatttttattgatttagttataggttattggttggtagtgtaatgggaggaaatatttattttatatatatattttatgattttgggggaattagaggaaatttaataagaaaatggttagaaatatttaaaatttttatttaaaagatttaagtaaattagagttttattagattaaaaattattataaatgtaagagtattgtttttagtgaaatgttgtggggtttgagaaggagattttttgttaaatttctgggataaaatgtgttatttaagtattagataatgagtagaatgtaaattaatttaattttttttattaataggttgttagtgtaatgtgtataatttagtgataagattgtaggatttaatatagctggatgtatgagttttagctaatgtagatttgttatatgaggatgtgttttattttgagtaggtgtttgtatgtgtggaatggggtaaagtggaataaaaggttaaaagtagaaatgttgatttaaagcttattatgaagaaattttttttttgtagctaaattatttttaaagtgggatgatattggtgaagaaagattgaaaaataatttttatgtgtgtttttggattgtaagtttaaaatggggaggagttgtagatagggtttgggggtggttagggtaaaggagagatatataagttgtaaatatatttgtagtttgttttatttattttgttttatattgaataagttttttaattttgtgaataaggataaggagggagtgttttaaagatattttatgttggtattgtaaattattgattgtaatgttaaataaatatatatttagagatgataatattaattttatagtaaaataattgtttatgtagaaatttagaggagattagtttgttttttttagctgatttatgttgggggataaaaggatttttaaaaattattttgaatatgtttggatttttttttttaatttttttggaaattaaatttgtttggaaatagtgttataaagagttgatgtttttaaaggtgattttttttgttttatataaataaggttttgtttttgttagttgagtgtagttttaggttttttgtttttagcttatatatattttttttgtttgtttggattttaatggtttaagatagttttgagcttattgggaaaagaaaatgattgttaaaaattatttttgaaattggttatttggtaatatttttaattgtatggaaatttattaaggtatattttatatataattagcttaaggttgttgattttataggttttatggatttaaatttgattgataataaagtaaataagagagttgaatttaaagtgtggtttttttgggttaggatgagcttaatatagtgtataaggaatttgaaagatttaggatatgtgttttaattaatgttaagtagaatggataagcttttagtattttgaaaatgttgggttagggttttttttttattgtgtgttttttgtttggggattaataagtattatagagaatgtgatttgaggtgattttttatttttgtataaatttagagtgaattattaaatagttgtttgtttaaagttaaggtaatttttttttgatgggtttatttgttttttgatttttaatttattagtttgtttttttagggttttgttttttttgtaattaaagcttttttagattagtgtagtatttatttgataggttgtttggaaaatttaagattggagaggtgatttgttgttgttttttaaattttttagttttaagtaatgtgttttttttttatatggggtgggggattggaaatggatgtagtgagatataaagagtgggtgttttgttgatttttgtatttttttttttttgattattttattttttttttttaagtttttgatttttagttttatttttttatttttgggtttgtattaaaagctggattgttttgggttgggtaggagctgaatttctgggagcttgtttgtgtagatttagtgtgtatggtgaggtagtagtctggtcttgtattgttgataggtgtaggtaggatagtttttttattgtggtttggggtgttttgattggtgtggagttatgttagttgtatctggagaagggtttgggaggaggtggaggtggagagggttggggagggtcgtggtggagtgatgttttggtattaggaagtttgtttttggttttaagatgttaggtcaatagggaagtgtggagttgtagatttggtttgttgtttgtttgggtgtttggagctgagctgtggtaaggtctggtttttgtttgattgtttgaggggtgtgtgtgtgtgtgttgtggagggtgtgtttagagggtcgtgttgtggttgtagtggttgttgttgttgtaggggatttaatattatttatttgtttttgttatttttgatatttttttgttagggttgttgtgtggggggggggtgggtagagtgtggttggtgttagctttttttattggaggggtttttgggggagggagggagagaagaagggggtttttgtttatttttgttttgttttggagcttggaagtttgttttttaaagatgttttgagtggtgtttttttgtttatattttatgtttttgtttgtttgttgattttttgtttctggatttttttgtttgagttttctggaggagatgggggtagcttggtttgagaatttggtgggggttgtgttttttggttttttttgtagtggggaaattttgtgtttagagtgtgatctggagtgggtagtggtggttatgggggtttggtggggtagtagttaaggattagtagagtgttgtgtttttttgtttatgaattgtatgaaaggtctgttttatttggagtattgagtagtggggattaagctgttggtcgtttttttatttttttgttattatttttagttgttagttatggttttggttttggtttctggttagttctggttgttggatttttttaagtataggttggaggtgtatattatttttgatatttttagtctggaggtcgtaggtaaggtgttgtgttgttttgtagatatttttgtttagctgttttgtgttatttgtttttttttgttttaaggaagttagtttttctggggggaggtgtggtgggagtggttgtttgtttggttttttgtagaatttctgggagctggaattttgattattttgtatttttttagtttttttttgactggtctggtttttggggtgttaagggtgtgagtaattttgttgttttttttatttgtattttggtcttttttttgttttttgggttataaaaattttagtattttgatttgaggatttttagaggtcgttgatttttgtttttgttttttttttggtttttagcttttgaggagctttatttgttaggaaattgtttgaaattatttagaaatgttttttgtgaagaggtattttttttttttttttgggaaagggccggtgaattttggtgtttaattgaatttttatatttttttttagtttttttaaattgtatggaaatttgagctttttgtgagggggaggggggtttgtaaattatgtgtgtgtgtgtgttttaggagatttggtgtgtttgtgtagaggtgtataaatatatttgaaagtataggttataaaagtgaatgtgttgttgtagtgagataaatatgtaaataaaatgtgtggtgttgggggaggggaggaaatggggtgtggatatttatatttgtgtttgtatattttataggtgtagtgttttttgtggtctggagttgttgtgtgtatttttttctggtgttaggtagtttagcttttttatggtttttgttgctggtttagttggtgtttgtgttgtaggtgggtatgttgatgggaaagtgtgtgtgttttgtttttagagaaagataaaagttagtaggggaagaatgaggatgtgggtgttgaggatttgtttaagaagaagtggtaaaggtggtagtggatttattttattagttagtagctttaggagctggaggtcattttttagaggaattgttatctggatatgtttatatgtgaagaaattgttgtgtggattaattttatggaagtttgagtctgggtaggagttagtatggagtttgggagggatggggggaggatgttgtggaggtataggtcaagtagattaggagagaatgtggaaggtagtgttgtttgggagggtgctggtggggtgtagctttgtaaaggtagaaggtcttgtggtggtctggttgtgagattatagttttttttttgaggtcgataggattgttgttttggtttaggtttttagagtggtactggtttattgttttgttattttgtgattttatgagctgggttgtatgggtaattttttgtataggatattgtgtttttggtttgtagttgttagagtagagctaataaaatttttattaggtcaagagttgtgaataggttttaatttgtgagtttttaataaggaaaatttgttagagatatggaagagttggtcttttttgggaaatttttgttctggtcttggtctagcttttttttttttgggtttgtgttttttatattttttttatggttgttttggtcatttaggttttttttatatattttattttttagttttgtgatttctgggagtaaagttttaatatataattattagtttttttagaaggagaaagaaaaaaagaagaaagatttttttgtttggtttatttatttttttttaggagttgaattttggaaattgaaatttatatttttttttttaaattataattatagttttgtaaaaagggtttattttaattttgtagtaaatttgtattttatggattggtaaaaatgagcttaaataaataatttaatagtaatgttttggtttatgttggttggtggaagattttaaatttgttaggattttggaagtagaaaatagaattaagtaaattaagtggtatttagaggttttgttgttaaaaaaaaaaaattaagtgttttgggtagaaaaaataaagtttctggttagagtagagtaaataaaaagaagaaaataatgataaaaagaataaagattaaaatgtttttttaaattagagggaatgaagatattttttgggtggtatttgtgtaaggtatgaggttatgttggtggataaaaggccgggaagaagttgaaaatggttttagtttaattgtttagagttagagctgggttttgggtggtgtggttttgagtaaggttagttttttattagcttttttgtatattaagggaatgggtcttttatgtattttttttgtttgagtaaagtttagatggtctagggtagaaatggtaagtaattaaagatagagtttatgggttttttgggattttttgaaaatgtttttttattttgtttgttattttgtagctttattttagtgttttgtagttgtggtgttgggttttttttgtagctgtttttttttttagggtggttgtttgttgagttaagtgggagtgaggtgtgttttttatagtagttgggtgtaaagaggaagggggataaaaaggaaattaagaatgaaaggaaaaagagaaaaagtggattatatggttgggtctggtggagatgtgtaatgtgaaatattattggtgttagcttggatattttaggtcaggtctttttttaatatataaaagttgttgtttggggtgatagggaggtctgatgtggattgggattggggttgtggttgggtcactggatatgggtggaagctggccggtctgggtggtcgtttgtaaagttaaatgatctggttgggtctggtgtgtggataggtctgtggtgggtttagggtaaagaagaggtagagtgaaagaagggggaatttttaaaattattttttctgggtttctggagtttaatatgttaagcttttggagttaatgagctgatgaagaggtggttttttgttttttatttggttgttttgttaggtgagaaagagtgttggtggtctagtttttgttaagggagtatgtattagggggtgggggatgatagtggaggttagggaaggaagggaggaattgtgtgggagaaagagtgattttttagtgtttttttagttttttttttttatttgtgggtttgtggttttggaatggaagtaagtttgtaaggtgttctgggaagggttggaaaagtttgttgttttgtgtttgttttatattaagtgtttttggatttggagaaatgtttggttgagtgattaaattgtttgtaggtttttatgtgtttggttgaggtttgtggtgtagctttgagttttagcttgtaggtcagagtagattaggttttttgtgtttggtggagatctgggtcagtaattgaaagctggtcttggtattttggtgtgtagggtggtgtagtgaagtgaggtcagggtgtgtgagtgtgttagtgtgtgtgttgggggaaggtgggggttggtctttgatggaagttttagtaatttgtattgtggtatttgtttgtttttttgttttaattgtttttaggtttggtttaagaattgttgggtcaaatggagaaagagggagtgtaattagtaggtcgagctatgtaagaatggttttgggtcgtagtttaatgggtttatgtagttttatgatgatatgtatttaggttatttttataataattgggtcgttaagggtcttatatttgtttttttatttattaagagcttttttttttttaattttatgaatgttaattttttgttattatagagtatgttttttttatttaattttattttgtttatgagtatgttgtttagtatggtgtttttagtagtgataggtgttctgggttttagttttaatagtttgaataatttgaataatttgagtagtttgttgttgaattttgtggtgttgatgtttgtttgtttttatgtgttgttgatttttttgtatgtttatagggatatgtgtaatttgagtttggtcagtttgagattgaaagtaaagtagtattttagctttggttatgttagtgtgtagaatctggtctttaatttgagtgtttgttagtatgtagtggactggtctgtgtgagttgtatttatagtgctgggattttaggattttgctggatggggtaattttgtttttgaaagattgggaattatgttagaaggttgtgggtattaaagaaagggagagaaagagaagctatatagagaaaaggaaattattgaattaaagagagagcttttttgattttaaagggatgtttttagtgtttgatattttttattataagtatttttaatagttgtaaggatatatatataaataaatgtttgattggatatgatattttaatattattataagcttgttattttttaagtttagtattgttaatatttaaatgattgaaaggatgtatatatattgaaatgttaaattaattttataaaagtagttgttagtaatattataatagtgtttttaaaggttaggttttaaaataaagtatgttatatagaagtgattaggattttttgtttgtgagtaagggagtgtatatattaaatgttatattgtatgtttttaatatattattattattataaaaaatgtgtgaatattagttttagaatagtttttttggtggatgtaatgatgtttttgaaattgttatgtataatttattttgtgtataatattttgtataatattattgttttattttttagtaaatatgaaataaatgtgttttattttatgggagtaaaatatattgtatataaattggtttggattttttttttttttttttgttattaatttggtcaggatattttagttattgttttttaaataaattagttttttttgtttgtttagttaaatatataaggtagtagtttttatttaaatttggtagaaataaatgatagttatttattagaaattaaaaagaaaaaaaaaggtatttctgggggggaaaagggttataaaatttaattttgtttttttaatttttttttggtttaaatttagaggattttattatggttagtaaataatatgaaaaagaaaaaagaagaaagaaatttagtaagtttattagct

SEQ ID NO: 62 - DNA, 1920 bp, Artificial Sequence
  Bisulfite treated of RASSF2A reverse complement after artificially methylated at ggcC, agCt, Ccgg
tgtagggttggggataggtatgtgagggggagaattttgagtagatagggaatttgtagctgggttgtttaagggtctttgtgtattgggggtgttaggaggtttagggatggaaaagggggaggtgagaaatggataaagaaatttggtctttttggtattgttgttatgtttggccggtctgttaagttgaaggggtctgtttagtttttgtctggtttaaatttttttgggaataagctgggatgttagaaaaaataaaattttataatttttgtttggggaatttaggtcgttggaggtgggtttggtagggtagtgtgattgttttttgggagtggttgttatagctctgggtgaattgaggagcttgggtcaagtttttattttttttggagagggtagtagtaaggaggtgaggggagttagcttattttttttaattttgtattttttttttatttttttatttttagtctggaagaattgttggtggtgggagtttggatgagctggtggggaaggggatgtagttatagtattgtttgggagggaggggagaagctttgtttttagaggggaggggagaagaggagggggtaggagataaggggaggaagaaaggtgaaggtaaggtgaaggggtggagagtgatatgaagagtgagagaaaagagaggatagtggatgagtagatctggtaggggttgaaaaaggtcaaggggttggagggagggagaggaaggaggaggggagtgaggagggtggggtgtctggtttttagttgtgtggtcattgtttgtttagtttggttggatttgagtctggtctgttgattgttggtcgaggtgtagctgaagtagttttttagttgtggtgtttttattttttaattttatggtttttgtggtgtgggtgtgatgtagctggtctggggtgaaggtaaggtgtggggtgtggggtgtggggtattgggagtgaggtattggtgtgggatgtctggtgtaaggtgtagggtgtgggtcgttttttttttgtgtttttttattttgttaaagtttttttatgatggtttttattctggttgggttagttttgtaatttttgtttgttttttgtttttttttttttttttgagttgtggggtttctggggtgtgtggatttttgttaggggtcgtgtaggtgtggagttttagctggtctgttttgggtttgaagaaagttgtggtttggagctagttttttttttatgatttttgggggtgtttttttttttttttgagtttgtgatgggaaggtgtttttattttatttctggggtttttgagattttttggtgaggtggggtggtgtggtaggtgtagggttggggagggtctgatagttttggagagtgtttgattttagtttgttgttgttttttaggtggattttttagaggtaggttttagtttctggtgtggggaggtggtgtgttttagaggggtgtagggtgtgtgggggtcgttggtcttctgggtattttttttttgtggtttttttgtttttttttggagctggtgtttgaggttgttgggattttagtttggtgtttttttttgttttgagtgaggtaggtgttgtgggtggtcctggttatttttgtattttgagtgtttattttgtatttagctttaagttggagagctttggggatagttgagagtgttagtggtcttatagggagattgagggttttgttttattttgggtgttgtgtgggtttgggttgtttatagtatttttgtgttttagtgataggagaagttaagtgtgaggtcttttaatagctgtgtgtattttattttttaggtatttggaattctggtgtttagaatgtgttttttgggagagtaaaggttgtgtttatggtagtttgg

SEQ ID NO: 63 - DNA, 5473 bp, Artificial Sequence
  Bisulfite treated of SHOX2 reverse complement after artificially methylated at ggcC, agCt, Ccgg
ttttattttttgttttattgatgtgttattattgggggggttggagtagtaaaaaaagaagaaggaaaaaaagagtggggttttgttggtagaggttgagtgctgggttgatgtgtggtggtgatggaagaatttatggtgtttgtttttaagttttttgattagaaagtgaaggagaagaaggaggtgattatgtactgggaggtgttggagagtgggtcgttgtgtggggtcaaggagttgactggttgtattgaggtgggtcgtgatgattgtagtagtctggtagtctgggtggccggtggaggtggtggtggaggaggtggaggtggtggtggaggaggtggaggaggtgtaggaggaggaggagtaggtggaggagctggaggagggtgtttttttgtctgggagctggatatgggtgttgttgagagaagtagggagctgggtagtttgtgattgatggagggtaatgatttgattgatttctggtagtggtttttttttttgttttctggattttttttgggtgggagaggattttgaggtctagtggggaggggagagggatatggagagggtcttggattttagctttgttagctagagtgatagtggaagggtgggggtctggtggtatgtttggttatgggtggggttttagtgtgttgtgggggtggtgtggggggaagtgtgtggggtttgtgtgtgttttttttagatgtttttattttattgaaatgtattttttattagtgggaggatgggtctgtagtctggatggtctgtaggtggatgtggaagtttgtggggccgggttgtaggagggggtgttgaattagatggtgggattaaagctagtttttagtgtagagtttgctgggagggagaaggggtagaggtggaaagcttaattttctggttgtttaggtgtttggggtcgttaagattttttgaattttgtagagtttttgaatttttggattttaggggtcaaaattttttatttttttttaaggtagaaggaagttaatgaaagctgaggtttaggttatgttgttttttctgggtgaggtgttttggttttttggtgtgttgggggtggggggggggggtggtgggggaggtggggatttatatttatataatttttttagtgtttttaattatttagtatttggtttttttagagtaaaaattttttggtgttagcttagtgttaggaaatgtttttattttaatggtagagtgttttatattaatttaaaggagtttaataataaaattgatttggtatttggtgtttgtagtaattggtgtattgttatatttttttaattaagaaaatatgtggtatgtgtggaattatatatttaagtaagtaattaagttgtttatgatatggtttgtttttgtttagattagtaattggaaatttggggataaaaatagagattttattaagtttatggattaatttgaaatttggatatttttttgaagttttaaaattttgagtggtatttattgtgtagatgatatgtaatagataaagtttttttattttattggtagaatttgaagggtgtgtttttatatttaaattttaatataatattagtaaaaatattttgttattaaattggtctataatgtttattataatgtttttttttaaagaaaggataaatgtttataaaattaattttgagaattagaaaatatggtaatatttaagattattgtagctagaatgtctggtagggtcgagatttagtgatttttttttttttaaattagtattaggtttttttaaatttgtaaagtggtggagttattgttaaggtgtttagtgtagttttctggtcatgagtttataattataggtctgaattataggtttgttagtgtgtttgatggtgaggtttaggtttgaatttctggtgggtgtagtttttgggattgttgatttttaagcttagggtaagtattaatttttttgtagactggtttttctggaaatgatttttaatatttatgttggtctggattttgtgttgggaagaattgtaaatagttttgattatttaaatttagctttgattttttaaaatctggagtttttgatttgggtgtagaggataaaggttttagggggatatatatatggtggttgtatatgtttatattagaagagcttttgtttttaaagggaggagaaggataggaaagtggtaatggatgtgtgtaaatttagagtagaaaaatttatattttattaaatatttgagctgttggttgtatgaaaaggttttgagtaattaatagaaattgaggattgtgaatattttgtttgaatttgttgatttttgtgggttaagtgtttagggttgagtttgtgtttttatgagggagggtgaagagagaatagaaagagtggttgtttttgtttgttactggaggttggttttttgttttttgttttttggtctggtttgggtggtgagttttttgggtagttaatatggtgtgggtgtttgtgtttgtgtgattctggttgggtaggtgggatggagattatttggttgtttaggggattttatgtagggtttggtctgagtttaggggtagtgaggggtgtttgtggatgtggttttttgtgtggtataatactggggtttgttgtttttgttgatattttttggtctaattgtttttaaattagattagtaagtttgtggtaggtagagagttagtggtggtgagagctggtctgagaatgagttagttttttgggaatggccggtgtgagaggtcagtgggtggtcttgttgtgtttttatgtttagattttgttttgtgagaggtctggtgttgtgtttttgatttttgtgagtgttgtggagtaagtgagtgtgaaagtgagtggaaattatttggtgtttgttggggaaggccggtgattggggggtgaatagtgaggtggtgagttgaggtatgtttgtgaaggaggtggtggatgattgtttattttgttttaggtggtcgtttagatttgatttttgtgtttttctgggatattttttttctgggtgggttgagaagctggattaggattttatgagggggaaggattttttatttttttttgtgataaatttggtaataggatttgttgtgttgtttttgtttgtgtgtgtgtgtgtgtgtgtgtgtgtttgtgtggatgtatgtgtggtcttgttggggtgttttttttagtgtttctggagctgaaagattgtaaagaggatgtgaaagggatggaggatgaaggtcagattaaaattaagtagaggtgaagttggattaattttattttggaataatttaatgagctggagaggttttttgatgagatttattattttgatgtttttatgtgagaggaattgagttagtgattgggtctgttggaggtctgagtgtaggtatttagctgttaggaggttgagggtctagggagtagagagagtttggggttggaaagaggtttgggggatatatttgggaggtggtgtttttagtgtttggtgtaagatgagaaggaaagagatatttttattagaggttttattttttaaagtagattttagttttatagtatttttttttttttttttttttttattttaatatatgtttttagaagaagaaagctgtgttgggtttttttttagagtttttataaattatattttttttgttttgtattggttttaatgtggtttaattttaatgggtctatttttataaggtttaaaaaaaaattttatagaaaatgttttatttttggatgttttaaaagttttaaagagtattttgttttttggagttggatttttttgaaagtttgttttgtagggtttaggtttgttaagtggatattttaattaggtttatagatgtgtagattataaagaaaattagtaattgttaagtgtagaaatttatagtttgttgttagtggttgattttaaattgtgtgtgaaatagtggagaaataaatgtattttggttattttttgtttatttatttaattaaggtaatgaaattgattttaaatatattagattttaaaataaattatatatattagtatttatatttttaaagtttgttttttagtatgtgttatatttaatgaagttaggattgaaatagattttttttattggttgtggaggtaaatgtaatagtaaaaataggttttgggggtatttaaaggagtaaattgtgtatatttatatatatatatttttttagctttagggggaataaatttaaatgttttagattgtatttttgtttagataataaaatagaataaaatgatagttattattggtttgaatatatggagtagttttaggtctgtatatttgtagctgttataaagtattgttgtaatagatatttttttggtttttgggtatagagattattatttgtagtgaattatgtataatttttaaggggtttttttatattttgtaataggattaggaaaaaaaaaaatagagtagttatgttgaagaggaaaagtaataataggttgttttggttattatagtattagtagtagagtttttttttttaagttttttttgttttgttttgtgtattgagatttttagaggtttagtaattttttaaaaatatgatgataattattatagttatgattattagtattttaattttaatttttttaggggaaaaaaaggtaagaagttttaggtcatgtgaattatataaaggatgttattttggtataaaatttattttttgttgtattaaatagtagagaaatttttgaagatttatattgattatgatatttgtttttaaaaatatattaatgaaagctttgaagtagtatttttattttaatggggttttaaaaattttaatttgtgagttaattaatatgttttattattgaaagtggaatataaaagtaagctttatttgaattttaaaaaatttgttatattgtttgtaaaagttgttaagtttaagtaggtaatatttaggagaataaagtatttaagagttatttgttttatatatattttattttttttttgttgagtgttttttttttttttttttaagaagtgaattttattgttgttttatatttttatttatattttagttattttttagatgtttttttattattttaattgtaaatagtggttttttttaaagaagtaaattagattattatgataatggtgtataattattttgttattgtgttttattttgttgtatagtagaatagagaaattttaaatttttttgtagtgaggtttttatgatattaattatttttttttaatttttataattttttttttgtaaaggagttattatttgttttggtgtttggtttttttttaagatgaagctaattaatattat

SEQ ID NO: 64 - DNA, 1405 bp, Artificial Sequence; identical to SEQ ID NO: 1
  artificially CGs methylated, Ca, Ct synthetically methylated

SEQ ID NO: 65 - DNA, 2365 bp, Artificial Sequence; identical to SEQ ID NO: 2
  artificially CGs methylated, Ca, Ct synthetically methylated

SEQ ID NO: 66 - DNA, 4261 bp, Artificial Sequence; identical to SEQ ID NO: 3
  artificially CGs methylated, Ca, Ct synthetically methylated

SEQ ID NO: 67 - DNA, 6343 bp, Artificial Sequence; identical to SEQ ID NO: 4
  artificially CGs methylated, Ca, Ct synthetically methylated

SEQ ID NO: 68 - DNA, 9001 bp, Artificial Sequence; identical to SEQ ID NO: 5
  artificially CGs methylated, Ca, Ct synthetically methylated

SEQ ID NO: 69 - DNA, 1920 bp, Artificial Sequence; identical to SEQ ID NO: 6
  artificially CGs methylated, Ca, Ct synthetically methylated

SEQ ID NO: 70 - DNA, 5473 bp, Artificial Sequence; identical to SEQ ID NO: 7
  artificially CGs methylated, Ca, Ct synthetically methylated

SEQ ID NO: 71 - DNA, 1405 bp, Artificial Sequence; identical to SEQ ID NO: 1
  Artificially CGs methylated, ggcC, agCt, Ccgg synthetically methylated

SEQ ID NO: 72 - DNA, 2365 bp, Artificial Sequence; identical to SEQ ID NO: 2
  Artificially CGs methylated, ggcC, agCt, Ccgg synthetically methylated

SEQ ID NO: 73 - DNA, 4261 bp, Artificial Sequence; identical to SEQ ID NO: 3
  Artificially CGs methylated, ggcC, agCt, Ccgg synthetically methylated

SEQ ID NO: 74 - DNA, 6343 bp, Artificial Sequence; identical to SEQ ID NO: 4
  Artificially CGs methylated, ggcC, agCt, Ccgg synthetically methylated

SEQ ID NO: 75 - DNA, 9001 bp, Artificial Sequence; identical to SEQ ID NO: 5
  Artificially CGs methylated, ggcC, agCt, Ccgg synthetically methylated

SEQ ID NO: 76 - DNA, 1920 bp, Artificial Sequence; identical to SEQ ID NO: 6
  Artificially CGs methylated, ggcC, agCt, Ccgg synthetically methylated

SEQ ID NO: 77 - DNA, 5473 bp, Artificial Sequence; identical to SEQ ID NO: 7
  Artificially CGs methylated, ggcC, agCt, Ccgg synthetically methylated

SEQ ID NO: 78 - DNA, 1405 bp, Artificial Sequence; identical to SEQ ID NO: 22
  artificially, CGs methylated, reverse complement Ca, Ct synthetically methylated

SEQ ID NO: 79 - DNA, 2365 bp, Artificial Sequence; identical to SEQ ID NO: 23
  artificially, CGs methylated, reverse complement Ca, Ct synthetically methylated

SEQ ID NO: 80 - DNA, 4261 bp, Artificial Sequence; identical to SEQ ID NO: 24
  artificially, CGs methylated, reverse complement Ca, Ct synthetically methylated

SEQ ID NO: 81 - DNA, 6343 bp, Artificial Sequence; identical to SEQ ID NO: 25
  artificially, CGs methylated, reverse complement Ca, Ct synthetically methylated

SEQ ID NO: 82 - DNA, 9001 bp, Artificial Sequence; identical to SEQ ID NO: 26
  Artificially, CGs methylated, reverse complement Ca, Ct synthetically methylated

SEQ ID NO: 83 - DNA, 1920 bp, Artificial Sequence; identical to SEQ ID NO: 27
  artificially, CGs methylated, reverse complement Ca, Ct synthetically methylated

SEQ ID NO: 84 - DNA, 5473 bp, Artificial Sequence; identical to SEQ ID NO: 28
  artificially, CGs methylated, reverse complement Ca, Ct synthetically methylated

SEQ ID NO: 85 - DNA, 1405 bp, Artificial Sequence; identical to SEQ ID NO: 22
  Artificially, CGs methylated, reverse complement ggcC, agCt, Ccgg synthetically methylated

SEQ ID NO: 86 - DNA, 2365 bp, Artificial Sequence; identical to SEQ ID NO: 23
  Artificially, CGs methylated, reverse complement ggcC, agCt, Ccgg synthetically methylated

SEQ ID NO: 87 - DNA, 4261 bp, Artificial Sequence; identical to SEQ ID NO: 24
  Artificially, CGs methylated, reverse complement ggcC, agCt, Ccgg synthetically methylated

SEQ ID NO: 88 - DNA, 6343 bp, Artificial Sequence; identical to SEQ ID NO: 25
  Artificially, CGs methylated, reverse complement ggcC, agCt, Ccgg synthetically methylated

SEQ ID NO: 89 - DNA, 9001 bp, Artificial Sequence; identical to SEQ ID NO: 26
  Artificially, CGs methylated, reverse complement ggcC, agCt, Ccgg synthetically methylated

SEQ ID NO: 90 - DNA, 1920 bp, Artificial Sequence; identical to SEQ ID NO: 27
  Artificially, CGs methylated, reverse complement ggcC, agCt, Ccgg synthetically methylated

SEQ ID NO: 91 - DNA, 5473 bp, Artificial Sequence; identical to SEQ ID NO: 28
  Artificially, CGs methylated, reverse complement ggcC, agCt, Ccgg synthetically methylated

SEQ ID NO: 92 - DNA, 1405 bp, Artificial Sequence
  Artificially, CGs methylated, Ca, Ct synthetically methylated, bisulfite treated
cgttattcgagttgtaaagggcggctttctgtgtctgtttcgctgcatcgatacatcgagctgcgcacggtgttcagcgcagggagaacaaatgatcatctgttcaacgcgttcatttacaggtgaggaaactaaggcttcaactcaatcgacgcactctgttcttttgattatcagaaaagtagcaggacaggtgttctgtttcgttctatttcggttcactaagtcggcatttcggcttcgattttcggctgtgttcggcgtcgtcgcggtgttcggcgtcgtcgtctcgttcggcggggtcgttcggagcgttcgcatcttcgttcgctttcatctggtcgggttcgtttcgttcggactcgggactgggaagtgcggcgactttcggaatcagtcattggcgtcagcgcggggagctgggggtgcagagctgcgggcgcggcgggtcacgcaggcggttttcattttcggtctggtctggtctggtctggtctgcgctgtcgcgcgggggcgttttctttcaggttcggcgttcgtcagtttcgcttcgtcaggtgcagcgcagcgcaggggtgggcgggggtggggctcggcgcgcacgttcacggggcggggagggggcgggtcaggggcgggatcacagtcggctgggtcggggttctatgcgcatcttcggggaggggcggggcgggggcggggtcggggcggggttcggtcggtgcacttcagacggcgggtcgttttctcttttcgtctttctactatcggttcaggattagcgttctgggagcgcgcgtttcgctgtctcgtcgtcacacttttctgggagcggcggtcacggaggcatcatgaagaagtcttactcaggtgggcttcgcgttcggggtggggaggggtcggtgtttcgggatcagcgctgctcatctgagtgtctgcggtcgggagtggcgaggcgttttcggagctgagcgagttttcgcggcgggcacactgcaggtcgagtttctttcaggacagggtcgctgtcgggtcgctttcgatctgagtcgatcgttttctgcgctgtcttcagttcttgctcgagtgtcggaggggctgttctgggggacgctttctctttctcgtttcttgcattctcgcaggaatcgctgacttttcaggtcggtcgggtgctttgggtttctgtgcgtctgtgtgggtgaatggggtcggggctaggtggaggggtgttcttgggttcagtctctagggctggtggttcaggtcgcagcattctttcttcggattctcttcggtttcttctctacttagtggggcacgggacggtcttcagatgggatcgttcagcagcgttcaaacttggcgactcgggttcacgttttgcgctcaggacgtcgttcgt

SEQ ID NO: 93 - DNA, 2365 bp, Artificial Sequence
  Artificially, CGs methylated, Ca, Ct synthetically methylated, bisulfite treated
gtggtcgtggtgggggtgttagctgcaggggtgttctcggtgggtgggagttggtggtctctcgctggtgtcatgggactcgcatgttcgttctgcgtttctcggctcttgagttcacaggtcgggattctgtctgtcagtcgcgtgcgctgtcgtttaattcttgcaggcgcagagcgcgcggcggcggtgacagagaactttgtttggctgttcaaatacagtcttctgcagaaggattctgcgttcggggaaggggaggaatctctttttctctgggcgttcgttcttctcgtcatggttcggtcttcacattcgttcacatctggtcgcagcggggcgttcggggggaggggctgaggtcgcgtctctcgtcgttttctgggcgcgggtcaggcggggaggaggggggcgcttcggtcgtgtgttcaggactgtttttcagcggtcactcgggtttcagtttttcaggtctggtcttgacaggcgggcggagcagtcagtgcgagacagggaggtcggtgcgggtgcgggaatctgattcgttcgggaggcgggggcggggcgggggcgcagcgcgcggggaggggtcggcgttcgtctttctttttcattcattcagctgagtcagggggtctaggggcttcttcggcggctagctctgcactgcaggagcgcgggcgcggcgtttcagtcagcgcgcagggttcgggtttcgtcgggggcgctttctcgtcgctgttcttcgcgcgattcgctgttcatcagtcatcatgtcggatttcgcggtcaacgcgcagctggatgggatcatttcggacttcgaaggtgggtgctgggctggctgctgcggtcgcggacgtgctggagaggattctgcgggtgggtctggcgcgggacgggggtgcgctgaggggagacgggagtgcgctgaggggagacgggatttctaattcaggcgttctttcgctgagagcgtcgcgcgttttcggtttcgtgttcgcgtcgtctacgtgggggattctgttaggggcattcgcgtagattctgcgcgttctcacaggattctgtgctcgttctgcgcactgtcgtctgggttttctttcttttattgttgtttgtgtttgtcaagcgacagcgatcttctcgagggctcgcgaggctgtctcggaactcttcaggacgcacagtttcactctgggaaattcatcggttttctttctttggctcttttcggcggctctcgggtttcgcttggattcggcaacgggatagggaggtcgtttctcatcttcgactgagtggacagtcgcgttctgctcgggtggacagttcttttctttttcacgtcagtttcggggtcgtcaagttgtgcagttcgtgggtcgggagcatcgaacggacacagttcaggtcgtggcagggtctagagtgggatgtttcatggttttcattcaggtctggggatattctcattcgtctttcagaatcgggtcgtgggggacagaaggggtctgcgtgcgggcagggagagtattttggctctcttctgtcttcggggtttacaaagtgtgttgggacttgcggggctgctctgttcaagtctgggtctggcgttcgcgtctctgagtctgtgagtgcgtgcgcttttctgcgttctcttgactgtcggtgctggggctctgcgttctgcgttcgcgggagtaaatacagcaggcgaaggggaagctcacacaatggtcttcagcgctctggggcagggcttctgaggggcgggtctgtctctgtcgggatctggagttttcgtttctcggagaggcttctaggctgacttgggcagagttctctggtgggtcgggagggggaaaggctgtgttgaaatgagcaaactgttcaggtgtcaggtcaagctgggaggtgatcagtctgaggttcttttcgcttcatggtcagaatcagggctgacatctgggtgttctgagttcagctgttcacacggttcatctggggtcagttctatctgagtgggggaggcggggtcttctgggggatcagaactttggctggacgtcaagcagagtgtcagtggctgttcttcagggctgggtctgaggagggtgtggggcggcgaagggacgggagggggttgtgattcagtggtcactggcgctgtgcagagtgtgagctggaaacatcgtagttactttgtcagcttagtggtgaaagttctttttcaggctctatttctttgcatttctgcttttcagagggaggggaggtctgggtctgcagagctgggagggcttgctgttttcgtttttctttttcacaacatcttctcatctggacatctttgggcacatgt

SEQ ID NO: 94 - DNA, 4261 bp, Artificial Sequence
  Artificially, CGs methylated, Ca, Ct synthetically methylated, bisulfite treated
aacaagagatcaatatctagaataaatggagatctgcaaatcaacagaaagtaggcagcaaagtcaaagaaaatagtctaaggcacagtcactaaaaggaacgtgatcatgttctttgcagggacatgggtggagctggaagtcgttagtctcagcaaactcacacaggaacagaaaatcagcgagatcgcatggtctcacttataagtgggagctgaacaatgagaacacatggtcacatggcggcgatcaacacacactggtgtctgttgagcggggtgctggggagggagagtatcaggaagaatagctaagggatactgggcttaatatctgggtgatgggatgatctgtacagcaaatcatcatggcgcacacatctatgtaacaaatctgcacattctgcacatgtatttcagaacttcaaataaaagttggacggtcaggcgtggtggctcacgtctgtaatttcagcactttgggaagtcgaggcgtgcagatcatctaaggtcaggagttcgagatcagttcggtcaacatggtgaaatttcgtctctactaaaaatacaaaaatcagtcagatgtggcacgcatctataatttcatctactcgggaggctgaagcagaattgcttgaattcgagaggcggaggttgcagtgagtcgtcgagatcgcgtcactgcacttcagtctgggtcacagcgtgagactacgtcataaaataaaataaaataacacaaaataaaataaaataaaataaaataaaataaaataataaaataaaataaaataaaataaaataaaataaaataaagcaattttcttttctctaagcggtcttcatttctcttttctgttctgtgaagcgggtgtgcaagcttcgggatcgcagcggtcttagggaattttttttcgcgatgtttcggcgcgtcagttcgctgcgcacacttcgctgcggttctctttctgctgtctgtttactttctaggtttcgctggggatctgggaaagagggaaaggctttttcggtcagctgcgcggcgacttcggggacttcagggcgtttctctgcggtcgacgttcggggtgcagcggtcgtcggggctggggtcggcgggagttcgcgggattcttcagaagagcggtcggcgtcgtgactcagcactggggcggagcggggcgggatcattcttataaggctcggaggtcgcgaggtcttcgctggagtttcgtcgtcgcagtcttcgtcatcagtgagtacgcgcggttcgcttttcggggatggggctcagagctttcagcatggggtcaattcgcagcatcaggttcgggctttcggcagggcttctcgttcatctcgagattcgggacgggggtctaggggattcaggacgttttcagtgtcgttagcggctttcagggggttcggagcgtctcggggagggatgggatttcgggggcggggagggggggcaggctgcgctcatcgcgtcttggcattctttttcgggcttcagcaaacttttctttgttcgctgcagtgtcgttctacatcgtggtctatttttcagttcgaggtaggagcatgtgtctggcagggaagggaggcaggggctggggctgcagttcacagtttctcgttcattcggagagattcgaattttcttatttcttcgtcgtgtggcttttatttcgggtcttctttctgtttttcgtctctttcgtcatgtctgcttttcgtttcagtgttgtgtgaaatcttcggaggaatctgtttatctgttttctttctgcacttctgatttcttttcgggttgctgcgaggcggagtcggttcggttttcacatctcgtacttctttcttttcgcaggtcgctgcgcggttctgcgcatgctgctggcagatcagggtcagagctggaaggaggaggtggtgatcgtggagacgtggcaggagggctcactcaaagtcttctgcgtaagtgatcatgttcgggcaaggggagggggtgctgggtcttagggggctgtgactaggatcgggggacgttcaagctcagtgtttctttctgagtcatgtctttttcaacagctatacgggcagcttttcaagtttcaggacggagatctcattctgtatcagttcaatatcattctgcgtcatctgggtcgcattcttggtgagtcttgaatcttcaagttcagggcaggcatgggcaagtctctgttttcggagttcttttgtttaaatcagctgtttcgcagttctctggagtggaggaaactgagattcactgaggttacgtagtttgttcaaggtcaagtctgggtgtctgcaattcttgttctgtgtcaggctgtctttcaggtgtcaggtgagctctgagcatctgctgtgtggcagtctctcattctttcacgcacattctctttttcttctttcaggctggggctcacagacagttttctggttggttcattttcagtgactgtgtgttgatcaggcgttcagtcacgcggtctgcttttcttcattcaatttcagggctctatgggaaggatcagcaggaggcagttctggtggacatggtgaatgacggcgtggaggatcttcgctgcaaatacatctttctcatctacatcaactatgtgagcatctgcatcagggttgggcactgggggctgaacaaagaaaggggcttcttgtgttctcatttttcttatttctcaggtggcttgggctgatttcttcttgggtcagggtgcaggggctgggtcagctctgggtcaggggttcaggggtctgggacaagacacaatctgcattcttattgtctgggacatcaatcagtcaagtaacgggtcatgggggcgagtgcaaggacagagatcttcagcaactggtggtttctgatcttctggggtggcgagggctttctggagtagtcagaggtggaggaggatttgtcgtcagtttctggatggaggtgctggcacttttagctgaggaaaatatgcagacacagagcacatttggggatctgggatcagttcagcagaggcagcgtgtgtgcgcgtgcgtgtgcgtgtgtgtgcgtgtgtgtgtgtacgcttgcatttgtgtcgggtgggtaaggagatagagatgggcgggcagtaggttcaggtttcgaaggtcttgaattcactggtttggagtcttctaagggcaatgggggtcattgagaagtctgaacagggctgtgtctgaatgtgaggtctagaaggattcttcagagaagtcagctctaaagcttttgcaatcatctggtgagagaattcagcaaggatggacaggcagaatggaatagagatgagttggcagctgaagtggacaggatttggtactagtctggttgtggggagcaagcagaggagaatctgggactctggtgtctggtctggggcagacgggggtgtctcaggggctgggagggatgagagtaggatgatacatggtggtgtctggcaggaggcgggcaaggatgactatgtgaaggcactgttcgggcaactgaagtcttttgagattctgctgtttcagaatcagggaggcaagatcttcattgtgggagatcaggtgagcatctggtttcatgctgtttctttctcgtcattctctgctttcagatggacacaggtgtgagtcatttgtttagcaaagcagagcagatctaggggatgggcttaggttctctgttttcaatttcttcagtctgctttcgctggctgagtttctagtttttctgttctgcagatcttcttcgctgactacaatctgctggacttgctgctgattcatgaggttctagtttctggctgtctggatgcgttttttctgctctcagcatatgtggggcgtctcagtgttcggttcaagctcaaggtctttctggtcttttctgagtacgtgaatcttttcatcaatggcaacgggaaacagtgagggttggggggactctgagcgggaggcagagtttgtctttctttcttcaggatcaataaaatttctaagagagctactatgagcactgtgttttctgggacggggcttaggggttctcagtctcgaggtcggtgggagggcagagcagaggactagaaaacagcttcttcagcacagtcagtggctttctggagttctcagtctggctgtgtttactgaatctcacaaactagaagaggaagaaaaaaaaagagagagagaaacaaagagaaata

SEQ ID NO: 95 - DNA, 6343 bp, Artificial Sequence
  Artificially, CGs methylated, Ca, Ct synthetically methylated, bisulfite treated
gattgtctattctcgtcatcagctgaaggcaaggtcgttctgctacgagcgtctcttaatctctacaaaatgaaaagaaaaaaagggaggattattagttcattactcagaggaatggggaggctgcaaaaatcgtcgatgggcagaggtgaagatgtctttctcggactgcacttttcggtgttctgtaactagagttcagttgtgggacttgttgaagaaatttgattttcttgtctcggcgagatttcaaaaatcagaaatagaaattctcagagtcagagaggaaatacaattaaacagcacgtgggcattttttttctcatttctcttttcttaaataacactgctttgagttttcactgggtaaagagagaaagtttgagttttcacggatgttacgtggaggttagaaatggcttaaaatgtagatctctaatcagttttcttcgtggctgaagaggctaattcttttcataaaatgagttcatctgtcgactgttagctatttcaaagtgaagggatttagcactcaaaacaaattgagcaagtttgtttgtctgtttttactgctaactcaaatgaattcaaaacacggagtaattcaagaaaacacataacatgtttcagacagttttcaaaagtagggaaagttcagcatctatatagtgactagggttagttttaagcgtcaagcttttttaaacgtatctattttatgcacattctttcgagtcactatatatttctaaaattgcgagtattggtatattgatttaggaagagcaatacaacttttagagggaactttattctcaattagggatcaaagagatgtctttttaatagcgggtctgagttttgctctcaagcaggaattaatattggtgggaaaattcgaattcaggagcaatggctgtgtttcggcacttttcaaaaacatacattaacaggatgttcttgagattgaaaaaacattgtttcatatgtctggcagaagtcttcacatctggttcttcaggcgaattatatttatagttctttcactcagaggcaggacagagtcaaaatattctgctcactatcaaaatacacatctttgctcaagtcaagaaatcagaaaatcagggttcagaagtaaggcacacttttcgagtgagaatatgttctgtaatttcacatactctttgctttgcaggagcaaatgtggacttgagggaaactctctttttcattttcacttctatttcgtgcaatttaatatcattctcgtcaggaatcttaatctcgtcattttaaaaaatgagatattcgtgattcagggtgaacttgttgaatgtaggtacagcagaggaaattctagactctatgagcgtctgagtcttgttcagtgcaaattcttcgtgaacactgggtcagtgcgtggtcgtgttcatctgtgcgtcgacactctcagcatgtctggttcattcgtcttgatctcgggcgcggtgtttcagctaagctgggttcagcgtttcggtctttttcagctgacaagtctagctcgttcgctttcggctgtggttctttcattctctttcactagctcacttcattcttctagatttctcttcactcattctctttcattttcatcgcgttcatcttcactttcgttctctatcggtctctcacttttctttcttcgcagtttctctttgctgtgatctcttttctcaactctgcaggtctgaaagaaggtcacacacgcacgctcacattcacacttcacacgtctcgtttcaaacaatttcatgaacattgttctttgtttcgtctcttgggtcactttttctgtcgctttctttcagttcgttctgatttgcttttcaaaagtacgtttctgtcttttcgctgttctggcgctttttctttgatttattagggctgtcgggttggcgcagattgctttttcttctctttcatttcattctttcttctggttcttcttttcacagtgggagttcgtgcttctgcttctcggttggcttctaagtgtttcgtcaggttttctcttctttcgctctttcggcttcggctttcgactcttcggttcgctggcatctgcttttcttttctgtctcgtttctcgtcgtttctgctcgcttttttcggcgctcgttcgggcgctgtgctcgcttctggatcgtcagtcgcgcagcgggctcgtcggcgttcgcgcgtcactgtgcagtggagtttggtggaatctctgctgacgtcacgtcacttttcacacggagtaggagcagagggaagagagagggatgagagggagggagaggagagagagtgcgagatcgagcgagaaagctggagaggagcagaaagaaactgtcagtggcggctagatttcggaggtttcagtgcattcgtggacttcttcggaacttggcattctcaggagttctgcagttctctcaggttcggctttcgggcgcttgtcgtgcagtcggaggctcggctcgctggaaatcgtttcgggaagcagtgggacgcggagacagcagctctctttcggtagtcggtaagtggaggtcatctatttcgcagggatgtgagataatgcgagtctggaaatttgtttcacttcggagaatcttcatcgtaggtgatttgtggcttttggggctaagtttcgttcaaggtaacgcagtcggcaaacagatcttgcaaagttctgtttctttcgtttttcgtcacagacactaacaatctacagggtgctgaagtcgagagggaagtcagatcgtggctggcatttaaaacgaggtatcttttcttaaatctcggtgtcaacactgcaggaacaaattctcgggtcaaggattagcattctcaagataaagggctgggtacaaagtttcagctactggaagattagttttcttttcattgttattcattgggaaaaaaaagaaaagaaaaagatttcatcttaactggcagttagtgatctctcaggttcaagcgaattatctgggagtcaggtctggatgtcaagctctcatcatttctttggattgtaacttctttaaattgatcatcagtcaacttcaatctggcacttcaggagatacactttaaatggatgcagagaattatttttcagctggagattaagaaaaaaattttcgattctaaatcttcgaaatatgtttctctttttcagtttaatcactttactttcttaagcaatttagaaatcaaactatcataaggtggtgtgatttttttttactcttttgtgtgagtattgtcttactaaactaaacggaaaaaacttttatcattataaatgtaaatatcagaattcatacattctaaaatatttttatgaaaaattaatctgatttaaagaaattttcttgcatttgttttagtctatcaatcaaaactaaagatgcttttatcacacaaaatatcattttggcagaaattcatctaaaattcaaatatcaataatatcaagaaaacaaagcacataagcaaaataaattgaagatttttgttgatgtaacatgagcatacaacatttcaataatcaaactttttctaaaaaattaaatagtcacttcatttgtggaatgttttactttaactcagcaaaattacacttaaattatttaggtgctttgtttcttaagttaagcgtgtttgtcttcaaatgtttctaaagcacttatattaattggttgtaaagaacgcatacacatggtaaaatacagaactgaactgagcagtattttaattttcttaaataattacttactacaaattaatttactggctaatttcacaatttagttcatttaaaacacatgtttctgtgctgtttatttttaaacttttcattaaagattttgttatggggtaacaaagtgtatgaaaaggggggaaatgtgaaaggatctgggattattcgaactgtattttttctgcactttcagtcttgcggtagtcatcagaaattattttttagcaaattgttttatttcttagggcttgtctgtctgctttgtcatggtttctcgttcttcgttagtcgtgtagtgctttttgtgtgctcacaatataaaattcaagttggtcaaaacaagagttcttggcatatacatttcaactagaacatgaactttgggggtgagaactatctttcatcaggaaaagtctttcatctcaatttgtgagattagtcattgaagtcagtttcgaagtctggcagtcaaatttctcacagaagacttgtcttgatagggcaagtttaaggatcagcaggcgggaattggaggtctctttttaaaaaattatctttttcagttatttagactcagttcttctagtaggtctggtcattaaatgaagcataaaaatgcaagtctcaaggctcattttgactgcaaaataaatcttcaagtcacaaggacatgtaggagtgagctaaggaacacgtcttgatcttcttttcagttcttagagtggagctctatgagttcttgaagatttgttttgtattgctttgtttggtcttcagcactgaagcacggggaagtggggggaagaatgtgtaataattgactgactttacatcaagcaacgcaatctttttcttttgtatatttcattctttaaaaaaaataaataaataaaaactatttgcagttatcatctgcagtgcttcggctatcagctaataatgcagtcagttcagacatataaaaaaaaaagattatcgaaatgatgatgacatgcaaattttcttcgaaattatcataagtaaacatttgaagtctggactaataaaatttcatctgtgttacttcatatcgagttagtagaaagctgtgataatgaattttgtaatatctcacgaacagacatctcaatcagggactaattctgtgattttactgcagaatcactaaatctggagtcgtcaaactgctacttctgggttcacgggttcacaaggatcgaatcggcagagttttcgttcgcgttctcgctagcgggtgggggaatcgtctggtcgttttcattctggattttcacgtcacagcgtcgggcagtttcttctgtaggcagcgatcttggtcagaggcttttcagggttcagctttcttcaggagaggtcgagacgcagggaaacggtactcaggtcagaggcaggttcgcagctttctgtttcgtctctgtgtcttcgtcaattcgacaacgcttgctttcatttcgattttcgcattcgcgcgaagtgggttcttcggtcgtcggcgtattctggttagcgtggagagaggcaggcgctgagatcgaaggggtctagggagttctggatcttcttttcttgtctttaaagcaatcgcggctcttctattcattcggtggagtttctcgagattcatctctttcggcttgtctgtggcagagaagggggagcgcgttaaatgcttggctcgctgcgttgtggttgaaaacgtgaaaaagatttggctcgttcgggagagaaagggggagaactgggtagcagttatatcagagctatttcttcgttcttggcgggcagtaaattcttcaagaacgtttgttctgctcttctcagtctcgctcagttcattcagtgtctcttctctgcgatcttaaatcatactttagggtaattatttgtagtaagtaaataaatggtcgggttagtatctctaggagaaagtgtggctaaatatggaaaagtggcttctgatggatgagaggttcgaactcagctcgcttctgaaacattctaggtcaagagttcgttcgtttcagaattacagaaaatcgagggaaactgctgtctaggacaggggcacgttggcgctgatgttctacaaatgtttatcgagcttcaactaatggacaagcactgaagggtggtctttgcatacagcttttcaaagagaaaagttctcttcattcattcactttcgctgtcattgcgttcagatgagttcttaatttcggcatcgagattcttgaaagtaggttcacagtcttttcagcacactgtggctttatagttctctaatctctgggcacttttgcggcaactctggagggagattttctcttgataaataaatgttctgggttcgaggctaggctggagatgctgctgcacatgtcagaggctgtcaggtcggaaaaacacgtctgaagtctagcacacagtaggcgtctaacagctagtgtaacgtagtctcatctgagttctgctcactcgacggtcgtcgcttcttacagtctttcttctcttctgttttgcaga

SEQ ID NO: 96 - DNA, 9001 bp, Artificial Sequence
  Artificially, CGs methylated, Ca, Ct synthetically methylated, bisulfite treated
agctgatggacttgctaaatttctttcttcttttttctttttcatattatttgctagtcataatggaattctctaggtttaagtcaaagaaaaattggagagacaaaattagattttgtagttcttttttttttcgggaatgtctttttttttctttttagtttctgatgaatggctatcatttatttctatcaaatttaaataaggactgctgtcttgtatgtttaactaggcaggcagagggaactggtttgtttaggaagcagtgactgagatgttctggtcaagttagtgacagaggaggggagaaagaattcagatcaatttgtatgcagtatattttactttcatgaaataaaacacatttgtttcatatttgctgaaaagtaaaacaataatattgtacgaaatgttatacacagggtaggttgtacatagcagtttcagaaacatcattgcattcatcagagaaactattctaaaactgatattcacacattttttataataataataatatgttagaaacatacagtgtggcatttagtatatacactttcttgctcgcaagcgaaaaattctaatcgcttctgtataacatgctttattttaaagtctaatctttaaaaacactgttgtgatattactaacaactgcttttataaaattaatttgacatttcgatatatatacattctttcagtcatttaaatgttaacaatgctaaacttaaaaaataacaagcttatagtaatgttaaaatgtcatattcagtcaaacatttgtttgtgtatgtgttcttgcaactgttagaaatacttgtagtgaaagatgtcagacactgaggacatttctttgaaatcaaaggagctctctctttgattcagtggttttcttttctctatatagcttctctttctctttctttctttagtgttcacgatcttctagcataattttcagtctttcaagggcggagttgtttcattcggcaaggttctaggatttcggcgctgtgggtgcggctcacacgggtcggttcactgcatactggcaagcactcaggttggaggtcgggttctgcacgctggcgtagtcgaagctggagtgctgctttgctttcagtctcaggctggtcaggctcgagttacacgtgtttctataaacatacggaggagtcggcggcgcgtaaggacaggcaggcgtcggcatcgcggaattcagcgacgggctactcaggttgttcaagttattcaggctgttgagactggagttcgggacgtctgtcactgctgagggcatcatgctggacgacatgctcatggacgagatagagttgggtggggaaaacatgctctgtgatgacagggggttgacgttcatagagttgaagaaggggaagctcttggtggatagggaggcggatgtaaggttcttggcggttcagttgttgtaggaatagtctgggtacatgtcgtcgtagggctgcatgagttcattgaactgcggttcgaagtcattcttgcatagctcggtctgctggttgcgctttctctttcttcatttggttcgacgattcttgaatcaaatctgggggcggttggggcaagggagcaaacagatgtcacagtgcagattactaaaactttcatcggaggtcaattttcgtcttttttcgacacacacgctagcgcactcacacattctggtctcgcttcactgcatcgttctgcacatcaagatatcagggtcagctttcagttactggttcgggtcttcatcaagcgcaggagatctggtctgctctggtctgcgagctgggactcggagctacgtcacaaatctcagtcgaacgcatggagatctgcggacggtttgatcactcagtcaggcgtttcttcaggttcaaaaacacttaatgtaaaacaaacgcggggcagcaggctttttcaattcttttcggggcatcttgcaaacttgctttcatttcaaagtcacagattcacggatgaggagaaggggctggaagggcactagaggatcgctctttctttcacgcaatttctttctttcttttctgatcttcactgtcgtttttcattttctggtacgtgctttcttaacagggactaggtcgtcaacactctttctcgtctagcaaaacaatcaaataaagagcaaaagatcatctcttcgtcagctcgttaacttcaggagcttggcatattaaacttcgggaattcggaaagggtagttttggagattttttcttctttcgctctgtctcttctttattctaagttcatcacaggtctgttcgcgcgtcaggttcagtcgggtcgtttggctttgcaggcggtcattcaggtcggtcggctttcattcgtgttcggtggttcagtcgcaatttcgatttcaattcacatcgggtctttctgtcgtttcagacggcggcttttgtgtattggagagaggtctggtctgagatattcgagctgacatcagtgatgtttcacattacacatcttcgtcgggttcagtcgtgtaattcgctttttctcttttttctttcattcttgattttctttttatttttctttctctttgcattcgactgctataaaaagcacgtctcactttcacttggctcgacaagcagtcgttctggaaggagaggcagctgcaaggagagttcagcgtcgcggctacaaagcactagggtggagctgcggaatagcgggcggggtgggagggcgttttcgaaggatttcagaaaattcatagactctgtctttaattacttgtcatttctattctaggtcatctaaactttgctcaggcgagaagagtacgtgagaggttcgttttcttgatgtgcaagagagctaatgaaagactgatcttgctcaaaatcacgtcgttcaggattcagctctggctctggacagttaaactaaaatcattttcaacttcttttcggtcttttattcatcagcatagtctcatgtcttgcacaaatgtcattcagagagtgtcttcattttctctgatttgggagagcattttggtctttattctttttatcgttgttttcttctttttgtttgctctgctctaatcgggggctttattttttctattcagagcacttaattttttttttttaacagcaaagtctctggatgtcgcttgatttgcttgattctgttttctgctttcagaattctaacaaatttggaatctttcatcgatcagcataaatcaggacgttgctattgggttatttatttgagctcatttttgtcaattcataaagtacagatttgctacaaagttaaggtaagttctttttacaaaactatgattataatttagaagagggggtgtgagtttcaattttcagagttcaacttctgagagaagataaataaatcaagcagaaaagtctttcttctttttttctttcttcttctaagaggactagtagttgtgtattaaaactttgctttcggagatcacaaaactaggaaatagggtgtgtgggagagatctgaatggtcgaaacaatcgtaaagaaggtgtaagaagcgcgagttcaggagggaaaaagctgggtcagggtcgggacaaaggtttttcagggagggtcaactctttcgtgtctctggcgggtttttcttgttaaaggctcacaggttggagtctgttcgcggctcttggtctggtagggattttattagctctgctctggcaactgcaagtcaggaacacaatgttctgtgcaggggattgttcatgcagttcagctcgtgagatcgcgggatggcggggcagtgagtcggtgtcgctctgggagtctgagtcagggcggcagttctgtcggtctcggagagggaactgtaatctcgcaatcaggtcgtcgcgaggtcttctgtctttgcaaagctgcgtttcatcggcgttctttcaggcggcgctgtctttcacattctcttctggtctacttggtctgtatcttcacaacattcttttttcatttctttcagacttcgtgctggcttctattcggactcgggctttcgtaaggttggttcacacagcgatttcttcgcgtgtggacatgttcgggtagcggtttctctggaaagtggtcttcagcttctggagctgctggctggtaaagtgagttcgctgtcgtctttgtcgcttcttcttagacgggttctcggcgttcacgttctcattctttttctgctggcttttatctttctctgaaaacgaaacacacacactttttcgtcagcatgttcatctgcaacgcggacgtcaactggatcggcggcagaagtcgtggaagagctgggctgtctggcgtcggaggagggtgcgcgcggcggcttcgggtcgcgaggagcgctgcgtctgtggggtgtgcaggcgcaagtgtgggtgttcgcgtttcattttcttttctttttcagcgtcgcacgttttatttacatgtttatctcactgcagcggcacattcacttttatagtctgtgctttcaagtatatttatacatctctgcgcagacacatcaaatcttctgggacgcgcacacgcgcgtggtttacagatttttctttttctcgcagaaagctcagattttcatgcggtttgggaaggctaggaaaagatgtggggattcggttgggcatcgaagttcgtcggttctttttcaaaaaaaaaaaaaaaatgtctcttcgcgaagggcatttctgagtggtttcaggcaattttctaacgagtggagcttctcgggagctgaaagtcgagaggaaaacagggacagaggtcggcggtctctgaaggttctcgaatcaagatgctgggatttttgtgattcaggaaacagaagggaggtcagggtacgaatagagagggcggcagaattgctcgcgttcttagcgtttcaggagtcgggtcggtcgagggagaactaaagggatgcggggtagtcaaaatttcggctttcggaagttctgcggggagtcaggcgaacgatcactttcatcacgtcttttttcggaggggctgactttcttggggcgagagggagcgggtggcgcagagcagctgagcgggaatgtctgcagggcggcgcggcgtcttatctgcggtcttcgggctggaggtgtcggagatggtgtgcatcttcagtctgtgcttggaggagttcagcgatcggggctgatcgggagtcagaatcgaagtcatggctaacggctggggatggtgacaggaagatgaggagacggtcgacagcttggttttcgctgctcggtgcttcaagtgaagcgggtctttcatgcagttcatggacgagggagcgcgacgctctactagttcttggctactgtttcgtcgagttttcgtagtcgtcgctgttcgcttcgggtcgcgctctaggcgcggagttttttcgctgcggggagagtcaggggacgcaattttcgtcgagttctcaagtcaagctgttttcgtcttcttcggaaggctcaagcgaaaaagttcggagacggaaagtcagcgggcaaacgaagacatgggatgtgggcagaagggcatcactcagagcgtctttagggagcaggctttcaagcttcaaagcgaaacaagagtgggcaaagattttcttcttctctttctttctttttcaagaatttcttcaataaggaaagctaacgtcgatcgcgctctgttcgtttttttttcacgcggcagttctgacagagaagtgtcaagagtgacagggacaggtaggtgatattagattttctgcggcggcagcagtcgctgcagtcacgacgcggttctctgagcgcattcttcgcaacgcgcacacgcacatttctcgggcggtcgaacaggagtcgggtcttgtcgcagctcagcttcaggcattcaggcgagcgacggatcagatctgcggcttcgcgcttttctgttggtctaacatcttaaaatcagaggcgggctttctggtgtcgagacgtcacttcgtcgcggttcttttcagttctcttcgtcttcgtcttctttcagattcttcttcgggtgcgactgacgtggcttcgcatcaatcaggacgtttcgagtcgcggtggagggactgttctgtctgcatctatcagcagtgcggggtcgggctactgtctcgtcgtgcgcactgggtctacacaggcaagctttcgggaattcagcttctgttcagttcaaggcgattcggcttttagtacgaattcaaaggtgaagagatgaggctaggagtcgaaggcttgggagaagagagtggaatggtcaagaagagaaaggtacaaggatcaacaagacattcactctttgtgtctcactacattcattttcaatttttcatttcatataaaaaggagacacgttacttaaaactagaaaatttgaaaaacagcaacaaatcatctcttcgatcttaaatttttcaaacagtctgtcaagtgaatgctgcgctaatctgaagaagctttaattgcaaagaagacagagttctgaaaaggcaggctaataaattagaaatcgagaagcaaatggattcgtcaaaagaaaattatcttgactttaaacgaacaactgtttggtggttcactctggatttatacaagaataaaaagtcgtctcagatcacgttctctgtgatgcttattagttttcagacagaaaacacacaatagaagagaaattctaattcagcgttttcaaaatgctgaaagcttattcattctacttaacgttgattaagacacatattctagatctttcaaatttcttgtacactgtattaagctcgttctaattcgagagagtcacgctttaaattcgactctcttgtttactttattatcaatcagatttaaattcataaagtctgtagaatcaacaatcttgagctaattatatatgaaatatgtcttaatgaattttcatacaattaagaatgttgtcaaataatcaatttcaaggataatttttaacagtcattttcttttttcagtgagctcaaggctgtcttgagtcattaaagttcaagcaggcagaaggggtgtgtgtgagctaagggcgaaaagtctagaactgcgctcaactagcaaaagcaaaatcttatttatataaaacaaaaaaaatcatctttggagacatcaactctttatagcactgttttcaagcaaatttaattttcaaagaaattaaagaaagaaattcaaacatattcaaaataatttttgaaagttcttttgtttttcagcataggtcagctggagaggacaaactaatcttctctgggtttctgcatgggcgattgttttactatggagttagtgttatcatctctgaatgtgtatttgtttgacattacagtcaatgatttgcaatgtcagcatgaagtatctttaaaacactttcttcttgttcttgttcacaagattgggaaacttattcgatgtggaacaaagtggatgaagcagactacaaatatatttgcaacttatgtgtctcttctttgttctgatcattttcaaattctatctgcaacttcttttcattttaaacttgcagttcaaagacgcacatgagaattgtttttcagtctttcttcatcagtatcatttcactttaagaataatttagctgcaagggaggaatttcttcatagtaagctttaaatcagcatttctgcttttaatcttttatttcactttatttcatttcacacatacagacatctgctcagagtaaaacacattctcatgtgacaggtctgcattagctgaggctcatacattcagctatattaggttctgcaatcttatcactaaattatacacattacactagcagtctgttggtaaagaaggttaaattaatttacattctgctcattatctggtgcttaaatgacgcattttatttcggagatttggcggagaatcttcttctcagatttcacagcgtttcactgaagacaatgctcttacatttgtagtggtttttaatctgataagactctaatttgcttaagtcttttaaataagggttttaaatgtttctagtcgttttcttattgaattttctctaattttttcaagatcataaagtatatgtgtaaagtaaatattttctttcattgcactgtcagtcgatgatctataactaagtcaataagaattcagctcttttctgctgaatgtgtttactaatcatatttcagtttcttcttttaaatctcagaatagctgtggttttcacaatatcatgtttcttaaagcttcatttcatgaagggacttcatcacattaaagaatgaaaaaaatcttcactgtagttagtatacacagtttctcacttcttgtttttcaagattcaaatttcagagctgcaaatatttttggaagcttgggtgttaatgtcttattttagaaagtcgagaagtttcacagagtcatatagatttctaaattcatctctcataaattcacagaattttgataaaagctctggtggcttcactctatcgatggaactttcatcacgacaaatatacatgtatgaaggatctcaatcagtcttcaaagtggttgaaaaattcaagggcacgtgactgcttctcatagtgtcaacgtgtgcgagatgttggaagcactggggatcagcagcagtctagatgtctaaaaagataaggtgttctaatttgtgtggattcattgaagtcaagtggtgaataaagacaattatctagataattcagattaaagtaaaagcaaaatcatatctatttgtatatatatattcacattcattttatattacagacacacacacgcacacacacactggctctgtaaacaactgactcaaagtgaggattttctttgcattttttcagcaggagtttcaacattcttctaatcttctaatcactttaca

SEQ ID NO: 97 - DNA, 1920 bp, Artificial Sequence
  Artificially, CGs methylated, Ca, Ct synthetically methylated, bisulfite treated
tcaggctgtcgtagacacagtctttgctctttcgaaaaacacgttctaggcgtcgggatttcagatatctgggaaatagagtgcacgcagctgttgagaggtctcgcgcttggcttcttctatcactgaggcgcagaggtgctgtggacagttcagattcacacggcgttcgaggtgaaacagaattctcagtctttctatgaggtcactggcactctcggctgttttcagagctcttcgacttagagctgaatgcaaagtaagcgctcgaaatgcagaagtagtcggggtcgttcacggcatctgtctcgctcggggcgagagaagacgtcaggctgaggtttcagcgatctcaggcatcagcttcgaaggagggcggggagatcgcaaaggggaagtgttcggagggtcaacggttttcgcgcattctgcgtttctctgaagcgcgtcgtcttttcgcgtcggggactgggatctgtctctggggaattcgtctagaagacggcggcggactggggtcgggcactcttcagggctgtcaggttcttttcagttctgcatctgtcgcgtcgtttcatctcgtcaggaagtctcagagatttcggggatggggtgggagcgtcttttcatcgcgggctcaaaaagaaggaaggacgttttcaggggtcgtagaaggaggactagcttcaagtcacaactttcttcggattcaaggcaggtcggctggggcttcgcgtctacacggtttctggcgggggttcgcgcgtttcgggagtttcgcggctcggggaggaaagaggagacaagagacaggcgaggattacggggctgattcagtcggggtagggatcatcgtggaaaaactttggcgaggtggggggacgcggaaagagagcggttcgcgttctgcatcttgcgtcgggcatttcgcgtcagtgtctcgctttcagtgtttcgcgtttcgcgtttcgcgtcttgtcttcatttcgggtcagctgcatcgcgttcgcgtcgcaggaatcgtggagttggaaagtgggggcgtcgcggctggggggctgcttcagctgcgtctcggtcagcgatcggcgggtcgggctcaaattcagtcaggctgggcaggcggtggtcgcgcgactggggatcgggcgtttcgttcttctcgcttttcttcttctttctctttctttcttcagtttcttggtctttttcagtttctatcggatctgctcgttcgctgttctctcttttctctcgctcttcatatcactcttcatttcttcgtcttgtcttcgtctttctttcttttcttgtcttctgttttcttctcttcttttcttttctctaggggcggagcttcttttctttctttcagacaatgctgtggctgcgttttctttttcgtcagctcgttcaggctttcgtcgtcagcgattctttcgggctgggggtggggaggtggggggggagtgcagggttggggaggatgagctggcttttctcatcttcttgctgctgttctcttcaagagggatggagacttggttcaagcttctcggttcattcggagctgtgacagtcactttcagggaacagtcacgctgttctatcaagttcatcttcagcggtctggatttttcaggcagaggttgtgggattttgttttttctaacatttcagcttattttcaaaagggtttgagtcggacaggggctaaacaggtttcttcgacttggcgggtcggtcagacgtgacagcaatgtcaaggaggtcaagtttctttgttcatttctcatctttttctttttcatttctggatcttctggcgttttcagtacacagaggttcttgagcagttcggctgcaggttttctatctactcagagttctttttctcacgtgtctattttcaattctgca

SEQ ID NO: 98 - DNA, 5473 bp, Artificial Sequence
  Artificially, CGs methylated, Ca, Ct synthetically methylated, bisulfite treated
gtaatgttaattagcttcatcttaaagaaaaatcaaacatcagagcaaataatgacttctttgcggagaaggagttgtaagggttggggagaggtaattagtgtcataaaagtctcactacaaagaagtttagaatttctctgttctgctgtgcagcagagtgaaacacagtagcagaataattgtgcatcattatcatgataatctaatttgcttctttagaaaaagtcactgtttgcagttaggatagtaggaaaacatctagaaaataactaaaatgtaaataaaagtatgaaacaacaataaagttcacttcttaagagaaaaaaagaagagcactcagcgaaaggagaatgaagtatatataaagcaagtaactcttaggtactttgttcttctggatgttatctgcttaaacttgacaacttttacaggcagtatgacagattttttaaaattcaaataaagcttgcttttgtatttcactttcaataataaagcatattgattgactcacaaattaaagtttttaaaatttcattaaagtaaaaatactgcttcagagctttcattggtatgtttttgaaagcaagtgtcatagtcaatgtaaatcttcaaaaatttctctgctatttagtacaacagagggtggattttgtgtcagggtggcattctttgtgtaattcacatggtctgaggcttcttgtcttttttttttctagaagagttggaattaagatactaataatcataactgtaataattatcatcatgtttttaaggggttgctgagtctctggagatctcagtgcacagagcgaagcaggagaggcttaaaaaggaaggctctgctgctgatgctgtgatgatcaaggcagtctattattactttttctcttcaacgtgactgctctgttttttttttttctgattctgttacaagatgtggggaagtttcttaagaattgtgcatagttcgctacagatggtggtctctgtgttcagagatcgaaagagtatctgttacagcgatactttgtaacagctgcagatgtgcgggtctaaaactgcttcatgtgttcaaatcaataataactatcattttattctattttattatctgagcggaaatacaatctgaaacatttaaatttgttttttctaaagctagaaggatatgtgtatgtgaatgtacacaatttgcttctttaaatgttttcaaagtctatttttgctattacatttgtcttcacaatcaataaagaaaatctgtttcagttctaacttcattgggtatggcacgtgctggagggcaggctttggaaatataaatactaatatatgtggtttgttttaaaatctaatgtatttagggtcagtttcgttgtcttggttaaatgaatgaacaaagagtgatcaaaatgcgtttatttcttcgctatttcacacacagtttgagatcgatcgctaacagcagactgtaaatttctgcacttaacagttactaattttctttatagtctgcacatctataaatctaattgggatattcgcttgacaaatctagattctgcagagcagactttcaaggaaattcaacttcagagaacaaaatactctttggaacttttaaggcattcagagataaaacgttttctgtgggatttttttttaagtcttataaaagtaggttcattaggattaaatcacattaaagtcagtgcgaggcaaggggggtgtggtttatagaaactctgggagaaagttcagcacagctttcttcttctgggaacatatgttaggatggaaaaaaaaaaaaggaggggagtgctataggactaagatctactttggaaaataagatctctagtaaagatatctcttttcttctcatcttacatcagacactagaagcatcatctttcgagtgtgtttttcaagtctcttttcaatttcaggctctctctgctttctgggttctcgatcttctggcagctgggtatctgcactcgggtcttcgacaggttcagtcgctggctcagtttctctcgcatgaaggcgtcgggatagtgggtctcgtcaaaaagtctcttcagctcattgagttgtttcagggtgaaattggttcgacttcgtctctgcttgattttggtctggtcttcgttcttcatttctttcgcattctctttgcgatctttcagcttcggggacactggagggggcatttcagcggggtcacacgtgcattcacacgaacacacacacacacgcacacacacacggacgaaaacagcacagcaaattctgttatcagatttgtcgcaaaaaagaatagagaattcttttttctcgtggaattctggttcggcttctcaattcattcggaggaagaatatttcggagaagcgcaaaggtcaagtctgagcggtcgtctggggcaaggtgggcagtcattcatcatcttcttcacaaacgtatctcgactcatcgtctcactattcatttttcagtcatcggtctttttcagcaaacatcaaatggttttcactcactttcgcactcacttgcttcgcagcactcacagaaatcaaaggcgcagcgtcaggtctctcacagagcaaagtctggacataagggcgcggcaaggtcattcactggtctctcacatcggtcattttcagaaggctggctcgttctcaggtcagctctcatcatcgctggctctctgtctatcgcaaacttgctggtctaatttaggaacaattgggtcgaaaggtatcagcgagagcaacagatttcggtgttgtgtcgcacagggagtcgcattcgcagacgtttctcgctgtttctgggctcgggtcaaattctgcataaggttttctggacagtcaggtaatcttcgtttcgtctgttcgatcggggtcgcacgagcacaggcgttcacgtcatgttggctgttcaaagggctcgtcgttcaagtcgggtcagaaggcaggaggcggaaaatcagtcttcggtggcgggcgaaagcaatcgctctttctgttctctcttcgttctttctcgtggaaacgcagactcgattctaaacgcttaattcacagagatcaacaggttcaagcggaatattcgcgattctcggtttctattggttgctcaaagtcttttcatgcaatcagcagctcggatgtttaataaaatatgaatttttctgctctgggtttgcacacattcgttgtcacttttctgttcttcttctttctttaaaaacaggagctcttctagtgtgagcatatacagtcatcatatatatatttttctggaatctttattctctgcgttcgaatcagagacttcgggttttaagaagtcaaagctgagtttagatagtcgaggctgtttgcagttcttttcagcgcaggattcaggtcagcatgggtgttaaaaatcattttcggaagagtcggtctgcagagaaattaatacttgttctgagcttggaaatcaacaatttcaggaactgcgttcgtcgggggttcagatctgaatctcgtcgtcaggcgcgctggcgaatctgtagttcgggtctgtagttgtggactcatggtcgggaggctgcactgggcatcttgacggtaacttcatcactttacaaatttaggaagatctggtgctggtttggaggaagaagagtcgctagatctcggttctgtcgggcattctagctacggtgatcttaaatattgtcgtattttctagttctcagagttagttttgtggacatttgttctttctttaggaaggaacattatagtaaacattatgggtcaatttaatagcaaagtatttttactgatattgtattgaaatttaaatatgaaaacacattcttcaaattctgtcaatgaggtgggaaggctttgtctattacatgtcatctacacagtggatgtcactcaaagttttggggcttcgaggagatgttcaaatttcaagttgattcatagacttaataaaatctctatttttgttttcaaattttcaattactgatctaaacaggaacagatcgtgtcataaacaacttaattgcttgcttaaatatgtgatttcacgcatgtcacatattttcttaattggaaaaatatggcagtacatcagttactgcaggcatcaagtgtcaaatcaattttattgttgaacttctttgaattggtatagaacgctctgtcattgagataaagacgttttctaacactgagctagcatcaaaggatttttgctctaagagaatcgagtactgggtgattgaaaacactaaaggaattgtgtaaatatagattttcatctttttcgtcgtttttttttttcgttttcaacacatcaagaaatcgaaacgtctcgttcgggagaagcagcgtagtctggatctcagctttcgttggctttcttctatcttgaaagagaatgggaagttttggtttctaagattcaaagattcaggggctctgcggagttcgaggggtcttggcggtttcaaacatctaggcgatcggagggttaagcttttcatctctgtttcttctttctttcggcaaactctgcgctagaggctagctttagtttcgtcgtctggttcagcattttcttctgcagttcggtttcgcgaactttcacgttcgtctgcgggtcattcgggctgcgggttcattctttcgctggtgaaaaatgcatttcggtggaatgggaacatctgggaagggcgcgcacaaatttcacacgctttttttcacgtcattttcacaacacactaggatttcattcatgatcgagcatatcatcggattttcattctttcactatcactctagctgacaaagctggggttcagggttctcttcgtgtttctcttttcttttcgctgggtctcggagttctctttcgttcgagaggagttcggaaggcgggaaggggaatcgctgtcgggggtcagtcaggtcgttattcttcgtcagtcgcgggctgttcggctttctgcttctctcggcggcgttcatgttcagctttcggacgggagagcgttcttcttcagcttcttcgtctgcttcttcttcttctacatcttcttcgtcttcttcgtcgtcgtcttcgtcttcttcgtcgtcgtcttcgtcggtcgttcggactgtcgggctgctgcggtcgtcgcggttcgtctcggtgcagtcggtcggcttcttggtttcgcgcagcggttcgctcttcagcatctttcggtacgtgatcgtcttcttcttcttcttcactttctggtcaaaagacttggagacgaacgtcgtaagttctttcatcgtcgtcgcacgtcagttcggcgctcaatctctgtcagcagagtttcgctcttttttttcttcttctttttttactgcttcagttttttcaataataacacatcaatgggacaggaggtgggg

SEQ ID NO: 99 - DNA, 1405 bp, Artificial Sequence
  artificially, CGs methylated, ggcC, agCt, Ccgg synthetically methylated, bisulfite treated
cgttattcgagttgtaaagggcggttttttgtgtttgtttcgttgtatcgatatatcgagctgcgtacggtgtttagcgtagggagaataaatgattatttgtttaacgcgtttatttataggtgaggaaattaaggttttaatttaatcgacgtattttgtttttttgattattagaaaagtagtaggataggtgttttgtttcgttttattccggtctattaagccggtattccggtttcgatttccggttgtgtccggcgtcgtcgcggtgtccggcgtcgtcgtttcgtccggcggggtcgtccggagcgttcgtattttcgttcgtttttatttggccgggtccgtttcgtccggattcgggattgggaagtgcggcgatttccggaattagttattggcgttagcgcggggagctgggggtgtagagctgcgggcgcggcgggtcacgtaggcggtctttatttccggtctggtctggtttggtttggtttgcgttgtcgcgcgggggcgtttttttttaggtccggcgttcgttagtttcgtttcgttaggtgtagcgtagcgtaggggtgggcgggggtggggttcggcgcgtacgtttacggggcggggagggggcgggttaggggcgggattatagccggttgggccggggttttatgcgtatttccggggaggggcggggcgggggcggggccggggcggggtccggtcggtgtattttagacggcgggtcgtttttttttttcgtttttttattaccggtctaggattagcgttttgggagcgcgcgtttcgttgtttcgtcgttatatttttttgggagcggcggtcacggaggtattatgaagaagttttatttaggtgggtttcgcgtccggggtggggaggggtcggtgttccgggattagcgttgtttatttgagtgtttgcggccgggagtggcgaggcgtttccggagctgagcgagttttcgcggcgggtatattgtaggtcgagttttttttaggatagggtcgttgtcgggtcgttttcgatttgagtcgatcgttttttgcgttgtttttagtttttgttcgagtgtcggaggggttgttttgggggacgttttttttttttcgttttttgtattttcgtaggaatcgttgattttttaggtcggccgggtgttttgggtttttgtgcgtttgtgtgggtgaatggggtcggggttaggtggaggggtgtttttgggtttagtttttagggttggtggtttaggtcgtagtatttttttttcggatttttttcggttttttttttatttagtggggtacgggacggtctttagatgggatcgtttagtagcgtttaaatttggcgattcgggtttacgttttgcgtttaggacgtcgttcgt

SEQ ID NO: 100 - DNA, 2365 bp, Artificial Sequence
  artificially, CGs methylated, ggcC, agCt, Ccgg synthetically methylated, bisulfite treated
gtggtcgtggtgggggtgttagctgtaggggtgttttcggtgggtgggagttggtggtctttcgttggtgttatgggattcgtatgttcgttttgcgtttttcggtttttgagtttataggccgggattttgtttgttagtcgcgtgcgttgtcgtttaatttttgtaggcgtagagcgcgcggcggcggtgatagagaattttgtttggttgtttaaatatagttttttgtagaaggattttgcgtccggggaaggggaggaatttttttttttttgggcgttcgtttttttcgttatggtccggtctttatattcgtttatatttggtcgtagcggggcgtccggggggaggggttgaggtcgcgtttttcgtcgttttttgggcgcgggtcaggcggggaggaggggggcgttccggtcgtgtgtttaggattgttttttagcggtcattcgggtcttagttttttaggtctggtcttgataggcgggcggagtagttagtgcgagatagggaggccggtgcgggtgcgggaatttgattcgtccgggaggcgggggcggggcgggggcgtagcgcgcggggaggggccggcgttcgttttttttttttatttatttagctgagttagggggtctaggggtttttccggcggttagctttgtattgtaggagcgcgggcgcggcgttttagttagcgcgtagggtccgggtctcgccgggggcgttttttcgtcgttgtttttcgcgcgattcgttgtttattagttattatgtcggatttcgcggttaacgcgtagctggatgggattatttcggatttcgaaggtgggtgttgggttggttgttgcggtcgcggacgtgttggagaggattttgcgggtgggtctggcgcgggacgggggtgcgttgaggggagacgggagtgcgttgaggggagacgggatttttaatttaggcgttttttcgttgagagcgtcgcgcgtttccggtctcgtgttcgcgtcgtttacgtgggggattttgttaggggtattcgcgtagattttgcgcgtttttataggattttgtgttcgttttgcgtattgtcgtttgggtttttttttttttattgttgtttgtgtttgttaagcgatagcgattttttcgagggttcgcgaggttgtttcggaattttttaggacgtatagttttattttgggaaatttatcggttttttttttttggttttttccggcggttttcgggtctcgtttggatccggtaacgggatagggaggtcgttttttattttcgattgagtggatagtcgcgttttgttcgggtggatagttttttttttttttacgttagtttcggggtcgttaagttgtgtagttcgtgggccgggagtatcgaacggatatagtttaggtcgtggtagggtttagagtgggatgttttatggtctttatttaggtctggggatatttttattcgttttttagaatcgggtcgtgggggatagaaggggtctgcgtgcgggtagggagagtattttggtttttttttgttttcggggtttataaagtgtgttgggatttgcggggttgttttgtttaagtttgggtttggcgttcgcgtttttgagtttgtgagtgcgtgcgtttttttgcgtttttttgattgccggtgttggggttttgcgttttgcgttcgcgggagtaaatatagtaggcgaaggggaagcttatataatggtttttagcgttttggggtagggtttttgaggggcgggtctgtttttgccgggatttggagttttcgtttttcggagaggtttttaggttgatttgggtagagttttttggtgggccgggagggggaaaggttgtgttgaaatgagtaaattgtttaggtgttaggtcaagctgggaggtgattagtttgaggtttttttcgttttatggtcagaattagggttgatatttgggtgttttgagtttagctgtttatacggtctatttggggttagttttatttgagtgggggaggcggggtcttttgggggattagaattttggttggacgttaagtagagtgttagtggttgttttttagggttgggtctgaggagggtgtggggcggcgaagggacgggagggggttgtgatttagtggtcattggcgttgtgtagagtgtgagctggaaatatcgtagttattttgttagcttagtggtgaaagtttttttttaggttttatttttttgtatttttgttttttagagggaggggaggtttgggtttgtagagctgggagggtttgttgttttcgttttttttttttataatatttttttatttggatatttttgggtatatgt

SEQ ID NO: 101 - DNA, 4261 bp, Artificial Sequence
  artificially, CGs methylated, ggcC, agCt, Ccgg synthetically methylated, bisulfite treated
aataagagattaatatttagaataaatggagatttgtaaattaatagaaagtaggtagtaaagttaaagaaaatagtttaaggtatagttattaaaaggaacgtgattatgttttttgtagggatatgggtggagctggaagtcgttagttttagtaaatttatataggaatagaaaattagcgagatcgtatggttttatttataagtgggagctgaataatgagaatatatggttatatggcggcgattaatatatattggtgtttgttgagcggggtgttggggagggagagtattaggaagaatagctaagggatattgggtttaatatttgggtgatgggatgatttgtatagtaaattattatggcgtatatatttatgtaataaatttgtatattttgtatatgtattttagaattttaaataaaagttggacggtcaggcgtggtggtttacgtttgtaattttagtattttgggaagtcgaggcgtgtagattatttaaggttaggagttcgagattagtccggtcaatatggtgaaatttcgtttttattaaaaatataaaaattagttagatgtggtacgtatttataattttatttattcgggaggttgaagtagaattgtttgaattcgagaggcggaggttgtagtgagtcgtcgagatcgcgttattgtattttagtttgggtcatagcgtgagattacgttataaaataaaataaaataatataaaataaaataaaataaaataaaataaaataaaataataaaataaaataaaataaaataaaataaaataaaataaagtaatttttttttttttaagcggtctttattttttttttttgttttgtgaagcgggtgtgtaagctccgggatcgtagcggttttagggaattttttttcgcgatgttccggcgcgttagttcgttgcgtatatttcgttgcggttttttttttgttgtttgtttattttttaggtctcgttggggatttgggaaagagggaaaggtttttccggtcagctgcgcggcgattccggggattttagggcgtttttttgcggtcgacgtccggggtgtagcggtcgccggggttggggccggcgggagttcgcgggattttttagaagagcggccggcgtcgtgatttagtattggggcggagcggggcgggattatttttataaggttcggaggtcgcgaggtcttcgttggagtttcgtcgtcgtagttttcgttattagtgagtacgcgcggtccgttttccggggatggggtttagagcttttagtatggggtcaattcgtagtattaggtccgggtttccggtagggtttttcgtttatttcgagatccgggacgggggtctaggggatttaggacgtttttagtgtcgttagcggtttttagggggtccggagcgtttcggggagggatgggattccgggggcggggagggggggtaggttgcgtttatcgcgttttggtatttttttccgggttttagtaaatttttttttgttcgttgtagtgtcgttttatatcgtggtttattttttagttcgaggtaggagtatgtgtttggtagggaagggaggtaggggttggggttgtagtttatagtttttcgtttatccggagagattcgaatttttttattttttcgtcgtgtggtttttattccgggtcttttttttgtttttcgtttttttcgttatgtttgtttttcgttttagtgttgtgtgaaattttcggaggaatttgtttatttgttttttttttgtatttttgatttttttccgggttgttgcgaggcggagtcggtccggtttttatatttcgtattttttttttttcgtaggtcgttgcgcggtcttgcgtatgttgttggtagattagggtcagagctggaaggaggaggtggtgatcgtggagacgtggtaggagggtttatttaaagttttttgcgtaagtgattatgtccgggtaaggggagggggtgttgggtcttagggggttgtgattaggatcgggggacgtttaagcttagtgtttttttttgagttatgttttttttaatagctatacgggtagctttttaagttttaggacggagattttattttgtattagtttaatattattttgcgttatttgggtcgtatttttggtgagttttgaatttttaagtttagggtaggtatgggtaagtttttgtttccggagtttttttgtttaaattagctgtttcgtagttttttggagtggaggaaattgagatttattgaggttacgtagtttgtttaaggttaagtttgggtgtttgtaatttttgttttgtgttaggttgttttttaggtgttaggtgagctttgagtatttgttgtgtggtagttttttatttttttacgtatattttttttttttttttttaggttggggtttatagatagttttttggttggtctatttttagtgattgtgtgttgattaggcgtttagttacgcggtctgtttttttttatttaattttagggttttatgggaaggattagtaggaggtagttttggtggatatggtgaatgacggcgtggaggattttcgttgtaaatatattttttttatttatattaattatgtgagtatttgtattagggttgggtattgggggttgaataaagaaaggggttttttgtgtttttattttttttattttttaggtggtttgggttgatttttttttgggttagggtgtaggggttgggttagctttgggtcaggggtctaggggtctgggataagatataatttgtatttttattgtttgggatattaattagttaagtaacgggttatgggggcgagtgtaaggatagagatttttagtaattggtggtttttgattttttggggtggcgagggttttttggagtagttagaggtggaggaggatttgtcgttagtttttggatggaggtgttggtatttttagctgaggaaaatatgtagatatagagtatatttggggatttgggattagtttagtagaggtagcgtgtgtgcgcgtgcgtgtgcgtgtgtgtgcgtgtgtgtgtgtacgtttgtatttgtgtcgggtgggtaaggagatagagatgggcgggtagtaggtctaggtttcgaaggtcttgaatttattggtttggagttttttaagggtaatgggggtcattgagaagtttgaatagggttgtgtttgaatgtgaggtttagaaggattttttagagaagttagctttaaagcttttgtaattatttggtgagagaatttagtaaggatggataggtagaatggaatagagatgagttggtagctgaagtggataggatttggtattagtttggttgtggggagtaagtagaggagaatttgggattttggtgtttggtctggggtagacgggggtgttttaggggttgggagggatgagagtaggatgatatatggtggtgtttggtaggaggcgggtaaggatgattatgtgaaggtattgtccgggtaattgaagttttttgagattttgttgttttagaattagggaggtaagatttttattgtgggagattaggtgagtatttggtcttatgttgtttttttttcgttattttttgtttttagatggatataggtgtgagttatttgtttagtaaagtagagtagatttaggggatgggtttaggtcttttgtttttaatttttttagtttgttttcgttggttgagtttttagtttttttgttttgtagatttttttcgttgattataatttgttggatttgttgttgatttatgaggttttagtttttggttgtttggatgcgttttttttgtttttagtatatgtggggcgttttagtgtccggtctaagcttaaggtctttttggtcttttttgagtacgtgaatttttttattaatggtaacgggaaatagtgagggttggggggattttgagcgggaggtagagtttgtttttttttttttaggattaataaaatttttaagagagctattatgagtattgtgttttttgggacggggtttaggggtttttagtttcgaggtcggtgggagggtagagtagaggattagaaaatagcttttttagtatagttagtggttttttggagtttttagtttggttgtgtttattgaattttataaattagaagaggaagaaaaaaaaagagagagagaaataaagagaaata

SEQ ID NO: 102 - DNA, 6343 bp, Artificial Sequence
  artificially, CGs methylated, ggcC, agCt, Ccgg synthetically methylated, bisulfite treated
gattgtttattttcgttattagctgaaggtaaggtcgttttgttacgagcgttttttaatttttataaaatgaaaagaaaaaaagggaggattattagtttattatttagaggaatggggaggttgtaaaaatcgtcgatgggtagaggtgaagatgtttttttcggattgtattttccggtgttttgtaattagagtttagttgtgggatttgttgaagaaatttgatttttttgtttcggcgagattttaaaaattagaaatagaaatttttagagttagagaggaaatataattaaatagtacgtgggtatttttttttttatttttttttttttaaataatattgttttgagtttttattgggtaaagagagaaagtttgagtttttacggatgttacgtggaggttagaaatggtttaaaatgtagatttttaattagtttttttcgtggttgaagaggttaattttttttataaaatgagtttatttgtcgattgttagctattttaaagtgaagggatttagtatttaaaataaattgagtaagtttgtttgtttgtttttattgttaatttaaatgaatttaaaatacggagtaatttaagaaaatatataatatgttttagatagtttttaaaagtagggaaagtttagtatttatatagtgattagggttagttttaagcgttaagcttttttaaacgtatttattttatgtatattttttcgagttattatatatttttaaaattgcgagtattggtatattgatttaggaagagtaatataatttttagagggaattttatttttaattagggattaaagagatgtttttttaatagcgggtctgagttttgtttttaagtaggaattaatattggtgggaaaattcgaatttaggagtaatggttgtgttccggtattttttaaaaatatatattaataggatgtttttgagattgaaaaaatattgttttatatgtttggtagaagtttttatatttggttttttaggcgaattatatttatagtttttttatttagaggtaggatagagttaaaatattttgtttattattaaaatatatatttttgtttaagttaagaaattagaaaattagggtttagaagtaaggtatatttttcgagtgagaatatgttttgtaattttatatattttttgttttgtaggagtaaatgtggatttgagggaaatttttttttttatttttatttttatttcgtgtaatttaatattattttcgttaggaattttaatttcgttattttaaaaaatgagatattcgtgatttagggtgaatttgttgaatgtaggtatagtagaggaaattttagattttatgagcgtttgagttttgtttagtgtaaatttttcgtgaatattgggttagtgcgtggtcgtgtttatttgtgcgtcgatatttttagtatgtttggtttattcgttttgatttcgggcgcggtgttttagctaagctgggtctagcgttccggtcttttttagctgataagtttagctcgttcgtttccggttgtggtctttttatttttttttattagcttattttatttttttagatttttttttatttatttttttttatttttatcgcgtttatttttattttcgttttttaccggttttttattttttttttttcgtagtttttttttgttgtgatttttttttttaattttgtaggtctgaaagaaggttatatacgtacgtttatatttatattttatacgtttcgttttaaataattttatgaatattgttttttgtttcgttttttgggtcattttttttgtcgtttttttttagttcgttttgatttgttttttaaaagtacgtttttgttttttcgttgttttggcgttttttttttgatttattagggttgccgggttggcgtagattgttttttttttttttttattttatttttttttttggtttttttttttatagtgggagttcgtgtttttgtttttcggttggtttttaagtgtttcgttaggtttttttttttttcgtttttccggttccggttttcgatttttcggtccgttggtatttgttttttttttttgtttcgtttttcgtcgtttttgttcgttttttccggcgttcgtccgggcgttgtgttcgtttttggatcgttagtcgcgtagcgggttcgccggcgttcgcgcgttattgtgtagtggagtttggtggaatttttgttgacgttacgttattttttatacggagtaggagtagagggaagagagagggatgagagggagggagaggagagagagtgcgagatcgagcgagaaagctggagaggagtagaaagaaattgttagtggcggttagatttcggaggtcttagtgtattcgtggattttttcggaatttggtatttttaggagttttgtagtttttttaggtccggttttcgggcgtttgtcgtgtagccggaggttcggttcgttggaaatcgttccgggaagtagtgggacgcggagatagtagcttttttccggtagccggtaagtggaggtcatttatttcgtagggatgtgagataatgcgagtttggaaatttgttttatttcggagaatttttatcgtaggtgatttgtggtttttggggttaagtttcgtttaaggtaacgtagtcggtaaatagattttgtaaagttttgtttttttcgtttttcgttatagatattaataatttatagggtgttgaagtcgagagggaagttagatcgtggttggtatttaaaacgaggtatttttttttaaatttcggtgttaatattgtaggaataaattttcgggtcaaggattagtatttttaagataaagggttgggtataaagttttagctattggaagattagttttttttttattgttatttattgggaaaaaaaagaaaagaaaaagattttattttaattggtagttagtgattttttaggtctaagcgaattatttgggagttaggtctggatgttaagcttttattatttttttggattgtaatttttttaaattgattattagttaattttaatttggtattttaggagatatattttaaatggatgtagagaattattttttagctggagattaagaaaaaaattttcgattttaaattttcgaaatatgttttttttttttagtttaattattttatttttttaagtaatttagaaattaaattattataaggtggtgtgatttttttttatttttttgtgtgagtattgttttattaaattaaacggaaaaaatttttattattataaatgtaaatattagaatttatatattttaaaatatttttatgaaaaattaatttgatttaaagaaatttttttgtatttgttttagtttattaattaaaattaaagatgtttttattatataaaatattattttggtagaaatttatttaaaatttaaatattaataatattaagaaaataaagtatataagtaaaataaattgaagatttttgttgatgtaatatgagtatataatattttaataattaaattttttttaaaaaattaaatagttattttatttgtggaatgttttattttaatttagtaaaattatatttaaattatttaggtgttttgttttttaagttaagcgtgtttgtttttaaatgtttttaaagtatttatattaattggttgtaaagaacgtatatatatggtaaaatatagaattgaattgagtagtattttaatttttttaaataattatttattataaattaatttattggttaattttataatttagtttatttaaaatatatgtttttgtgttgtttatttttaaattttttattaaagattttgttatggggtaataaagtgtatgaaaaggggggaaatgtgaaaggatttgggattattcgaattgtattttttttgtatttttagttttgcggtagttattagaaattattttttagtaaattgttttattttttagggtttgtttgtttgttttgttatggtttttcgtttttcgttagtcgtgtagtgttttttgtgtgtttataatataaaatttaagttggtcaaaataagagtttttggtatatatattttaattagaatatgaattttgggggtgagaattattttttattaggaaaagttttttattttaatttgtgagattagttattgaagttagtttcgaagtttggtagttaaattttttatagaagatttgttttgatagggtaagtttaaggattagtaggcgggaattggaggtttttttttaaaaaattattttttttagttatttagatttagtttttttagtaggtctggttattaaatgaagtataaaaatgtaagttttaaggtttattttgattgtaaaataaatttttaagttataaggatatgtaggagtgagctaaggaatacgttttgattttttttttagtttttagagtggagctttatgagtttttgaagatttgttttgtattgttttgtttggtttttagtattgaagtacggggaagtggggggaagaatgtgtaataattgattgattttatattaagtaacgtaattttttttttttgtatattttattttttaaaaaaaataaataaataaaaattatttgtagttattatttgtagtgttccggttattagctaataatgtagttagtttagatatataaaaaaaaaagattatcgaaatgatgatgatatgtaaatttttttcgaaattattataagtaaatatttgaagtttggattaataaaattttatttgtgttattttatatcgagttagtagaaagctgtgataatgaattttgtaatattttacgaatagatattttaattagggattaattttgtgattttattgtagaattattaaatttggagtcgttaaattgttatttttgggtctacgggtctataaggatcgaatcggtagagttttcgttcgcgttttcgttagcgggtgggggaatcgtttggtcgtttttattttggatttttacgttatagcgccgggtagttttttttgtaggtagcgattttggtcagaggttttttagggtctagctttttttaggagaggtcgagacgtagggaaacggtatttaggtcagaggtaggtccgtagctttttgtttcgtttttgtgttttcgttaattcgataacgtttgtttttatttcgattttcgtattcgcgcgaagtgggtcttccggtcgtcggcgtattttggttagcgtggagagaggtaggcgttgagatcgaaggggtctagggagttttggattttttttttttgtttttaaagtaatcgcggtttttttatttatccggtggagtttttcgagatttattttttccggtttgtttgtggtagagaagggggagcgcgttaaatgtttggttcgttgcgttgtggttgaaaacgtgaaaaagatttggttcgtccgggagagaaagggggagaattgggtagtagttatattagagctattttttcgtttttggcgggtagtaaattttttaagaacgtttgttttgttttttttagtttcgtttagtttatttagtgttttttttttgcgattttaaattatattttagggtaattatttgtagtaagtaaataaatggccgggttagtatttttaggagaaagtgtggttaaatatggaaaagtggtttttgatggatgagaggtccgaatttagctcgtttttgaaatattttaggtcaagagttcgttcgttttagaattatagaaaatcgagggaaattgttgtttaggataggggtacgttggcgttgatgttttataaatgtttatcgagctttaattaatggataagtattgaagggtggtttttgtatatagctttttaaagagaaaagttttttttatttatttattttcgttgttattgcgtttagatgagtttttaattccggtatcgagatttttgaaagtaggtttatagtttttttagtatattgtggttttatagttttttaatttttgggtatttttgcggtaattttggagggagatttttttttgataaataaatgttttgggtccgaggttaggttggagatgttgttgtatatgttagaggttgttaggtcggaaaaatacgtttgaagtttagtatatagtaggcgtttaatagctagtgtaacgtagttttatttgagttttgtttattcgacggtcgtcgttttttatagtttttttttttttttgttttgtaga

SEQ ID NO: 103 - DNA, 9001 bp, Artificial Sequence
  artificially, CGs methylated, ggcC, agCt, Ccgg synthetically methylated, bisulfite treated
agctgatggatttgttaaattttttttttttttttttttttttatattatttgttagttataatggaattttttaggtttaagttaaagaaaaattggagagataaaattagattttgtagttttttttttttccgggaatgtttttttttttttttttagtttttgatgaatggttattatttatttttattaaatttaaataaggattgttgttttgtatgtttaattaggtaggtagagggaattggtttgtttaggaagtagtgattgagatgttttggtcaagttagtgatagaggaggggagaaagaatttagattaatttgtatgtagtatattttatttttatgaaataaaatatatttgttttatatttgttgaaaagtaaaataataatattgtacgaaatgttatatatagggtaggttgtatatagtagttttagaaatattattgtatttattagagaaattattttaaaattgatatttatatattttttataataataataatatgttagaaatatatagtgtggtatttagtatatatatttttttgttcgtaagcgaaaaattttaatcgtttttgtataatatgttttattttaaagtttaatttttaaaaatattgttgtgatattattaataattgtttttataaaattaatttgatatttcgatatatatatatttttttagttatttaaatgttaataatgttaaatttaaaaaataataagcttatagtaatgttaaaatgttatatttagttaaatatttgtttgtgtatgtgtttttgtaattgttagaaatatttgtagtgaaagatgttagatattgaggatatttttttgaaattaaaggagctttttttttgatttagtggtttttttttttttatatagcttttttttttttttttttttttagtgtttacgattttttagtataatttttagttttttaagggcggagttgttttatccggtaaggttttaggattccggcgttgtgggtgcggtttatacgggccggtttattgtatattggtaagtatttaggttggaggccgggttttgtacgttggcgtagtcgaagctggagtgttgttttgtttttagttttaggttggtcaggttcgagttatacgtgtttttataaatatacggaggagtcggcggcgcgtaaggataggtaggcgtcggtatcgcggaatttagcgacgggttatttaggttgtttaagttatttaggttgttgagattggagtccgggacgtttgttattgttgagggtattatgttggacgatatgtttatggacgagatagagttgggtggggaaaatatgttttgtgatgatagggggttgacgtttatagagttgaagaaggggaagcttttggtggatagggaggcggatgtaaggtctttggcggtctagttgttgtaggaatagtttgggtatatgtcgtcgtagggttgtatgagtttattgaattgcggtccgaagttatttttgtatagctcggtctgttggttgcgttttttttttttttatttggtccgacgatttttgaattaaatttgggggcggttggggtaagggagtaaatagatgttatagtgtagattattaaaatttttatcggaggtcaattttcgttttttttcgatatatacgttagcgtatttatatattttggtctcgttttattgtatcgttttgtatattaagatattagggtcagcttttagttattggtccgggtttttattaagcgtaggagatttggtttgttttggtctgcgagctgggattcggagctacgttataaattttagtcgaacgtatggagatttgcggacggtttgattatttagttaggcgtttttttaggtttaaaaatatttaatgtaaaataaacgcggggtagtaggtttttttaattttttccggggtattttgtaaatttgtttttattttaaagttatagatttacggatgaggagaaggggttggaagggtattagaggatcgtttttttttttacgtaattttttttttttttttttgatttttattgtcgttttttattttttggtacgtgtttttttaatagggattaggtcgttaatattttttttcgtttagtaaaataattaaataaagagtaaaagattattttttcgttagctcgttaattttaggagcttggtatattaaattccgggaatccggaaagggtagttttggagatttttttttttttcgttttgttttttttttattttaagtttattataggtctgttcgcgcgttaggtctagccgggtcgtttggttttgtaggcggtcatttaggccggccggtttttattcgtgtccggtggtctagtcgtaatttcgattttaatttatatcgggtctttttgtcgttttagacggcggtttttgtgtattggagagaggtctggtctgagatattcgagctgatattagtgatgttttatattatatattttcgccgggtctagtcgtgtaattcgttttttttttttttttttttatttttgattttttttttatttttttttttttttgtattcgattgttataaaaagtacgttttatttttatttggttcgataagtagtcgttttggaaggagaggtagctgtaaggagagtttagcgtcgcggttataaagtattagggtggagctgcggaatagcgggcggggtgggagggcgttttcgaaggattttagaaaatttatagattttgtttttaattatttgttatttttattttaggtcatttaaattttgtttaggcgagaagagtacgtgagaggtccgtttttttgatgtgtaagagagctaatgaaagattgattttgtttaaaattacgtcgtttaggatttagctttggttttggatagttaaattaaaattatttttaatttttttccggtcttttatttattagtatagttttatgttttgtataaatgttatttagagagtgtttttattttttttgatttgggagagtattttggtttttattttttttatcgttgtttttttttttttgtttgttttgttttaaccgggggttttattttttttatttagagtatttaattttttttttttaatagtaaagtttttggatgtcgtttgatttgtttgattttgttttttgtttttagaattttaataaatttggaattttttatcgattagtataaattaggacgttgttattgggttatttatttgagcttatttttgttaatttataaagtatagatttgttataaagttaaggtaagttttttttataaaattatgattataatttagaagagggggtgtgagttttaatttttagagtttaatttttgagagaagataaataaattaagtagaaaagttttttttttttttttttttttttttttaagaggattagtagttgtgtattaaaattttgtttccggagattataaaattaggaaatagggtgtgtgggagagatttgaatggtcgaaataatcgtaaagaaggtgtaagaagcgcgagtttaggagggaaaaagctgggtcagggccgggataaaggttttttagggagggtcaattttttcgtgtttttggcgggttttttttgttaaaggtttataggttggagtttgttcgcggtttttggtctggtagggattttattagctttgttttggtaattgtaagttaggaatataatgttttgtgtaggggattgtttatgtagtttagctcgtgagatcgcgggatggcggggtagtgagccggtgtcgttttgggagtttgagttagggcggtagttttgtcggtctcggagagggaattgtaatttcgtaattaggtcgtcgcgaggtcttttgtttttgtaaagctgcgttttaccggcgtttttttaggcggcgttgttttttatatttttttttggtttatttggtctgtatttttataatattttttttttattttttttagatttcgtgttggtttttatccggattcgggttttcgtaaggttggtttatatagcgattttttcgcgtgtggatatgtccgggtagcggtttttttggaaagtggtctttagcttttggagctgttggttggtaaagtgagttcgttgtcgtttttgtcgtttttttttagacgggttttcggcgtttacgtttttattttttttttgttggtttttatttttttttgaaaacgaaatatatatattttttcgttagtatgtttatttgtaacgcggacgttaattggaccggcggtagaagtcgtggaagagctgggttgtttggcgccggaggagggtgcgcgcggcggttccgggtcgcgaggagcgttgcgtttgtggggtgtgtaggcgtaagtgtgggtgttcgcgttttattttttttttttttttagcgtcgtacgttttatttatatgtttattttattgtagcggtatatttatttttatagtttgtgtttttaagtatatttatatatttttgcgtagatatattaaattttttgggacgcgtatacgcgcgtggtttatagatttttttttttttcgtagaaagcttagatttttatgcggtttgggaaggttaggaaaagatgtggggattcggttgggtatcgaagttcgccggtctttttttaaaaaaaaaaaaaaaatgttttttcgcgaagggtatttttgagtggttttaggtaattttttaacgagtggagcttttcgggagctgaaagtcgagaggaaaatagggatagaggtcggcggtctttgaaggttttcgaattaagatgttgggatttttgtgatttaggaaatagaagggaggtcagggtacgaatagagagggcggtagaattgttcgcgtttttagcgttttaggagccgggccggtcgagggagaattaaagggatgcggggtagttaaaattccggtttccggaagttttgcggggagttaggcgaacgattatttttattacgtttttttccggaggggttgatttttttggggcgagagggagcgggtggcgtagagtagctgagcgggaatgtttgtagggcggcgcggcgttttatttgcggtctccgggttggaggtgtcggagatggtgtgtatttttagtttgtgtttggaggagtttagcgaccggggttgaccgggagttagaatcgaagttatggttaacggttggggatggtgataggaagatgaggagacggtcgatagcttggttttcgttgttcggtgttttaagtgaagcgggtcttttatgtagtttatggacgagggagcgcgacgttttattagtttttggttattgtttcgtcgagttttcgtagtcgtcgttgttcgttccgggtcgcgttttaggcgcggagttttttcgttgcggggagagttaggggacgtaattttcgtcgagtttttaagttaagctgttttcgttttttccggaaggtttaagcgaaaaagtccggagacggaaagttagcgggtaaacgaagatatgggatgtgggtagaagggtattatttagagcgtttttagggagtaggtttttaagctttaaagcgaaataagagtgggtaaagatttttttttttttttttttttttttttaagaatttttttaataaggaaagctaacgtcgatcgcgttttgttcgttttttttttacgcggtagttttgatagagaagtgttaagagtgatagggataggtaggtgatattagattttttgcggcggtagtagtcgttgtagttacgacgcggtcttttgagcgtatttttcgtaacgcgtatacgtatatttttcgggcggtcgaataggagccgggtcttgtcgtagcttagctttaggtatttaggcgagcgacggattagatttgcggtttcgcgtttttttgttggtctaatattttaaaattagaggcgggttttttggtgtcgagacgttatttcgtcgcggtcttttttagtttttttcgttttcgtttttttttagatttttttccgggtgcgattgacgtggtttcgtattaattaggacgtttcgagtcgcggtggagggattgttttgtttgtatttattagtagtgcggggccgggttattgtttcgtcgtgcgtattgggtttatataggtaagcttccgggaatttagcttttgtttagtttaaggcgatccggtttttagtacgaatttaaaggtgaagagatgaggttaggagtcgaaggtttgggagaagagagtggaatggttaagaagagaaaggtataaggattaataagatatttattttttgtgttttattatatttatttttaattttttattttatataaaaaggagatacgttatttaaaattagaaaatttgaaaaatagtaataaattattttttcgattttaaattttttaaatagtttgttaagtgaatgttgcgttaatttgaagaagctttaattgtaaagaagatagagttttgaaaaggtaggttaataaattagaaatcgagaagtaaatggattcgttaaaagaaaattattttgattttaaacgaataattgtttggtggtttattttggatttatataagaataaaaagtcgttttagattacgttttttgtgatgtttattagtttttagatagaaaatatataatagaagagaaattttaatttagcgtttttaaaatgttgaaagcttatttattttatttaacgttgattaagatatatattttagattttttaaattttttgtatattgtattaagctcgttttaattcgagagagttacgttttaaattcgatttttttgtttattttattattaattagatttaaatttataaagtttgtagaattaataattttgagctaattatatatgaaatatgttttaatgaatttttatataattaagaatgttgttaaataattaattttaaggataatttttaatagttattttttttttttagtgagcttaaggttgttttgagttattaaagtttaagtaggtagaaggggtgtgtgtgagctaagggcgaaaagtttagaattgcgtttaattagtaaaagtaaaattttatttatataaaataaaaaaaattatttttggagatattaattttttatagtattgtttttaagtaaatttaatttttaaagaaattaaagaaagaaatttaaatatatttaaaataatttttgaaagtttttttgttttttagtataggttagctggagaggataaattaattttttttgggtttttgtatgggcgattgttttattatggagttagtgttattatttttgaatgtgtatttgtttgatattatagttaatgatttgtaatgttagtatgaagtatttttaaaatattttttttttgtttttgtttataagattgggaaatttattcgatgtggaataaagtggatgaagtagattataaatatatttgtaatttatgtgttttttttttgttttgattatttttaaattttatttgtaatttttttttattttaaatttgtagtttaaagacgtatatgagaattgttttttagtttttttttattagtattattttattttaagaataatttagctgtaagggaggaatttttttatagtaagctttaaattagtatttttgtttttaattttttattttattttattttattttatatatatagatatttgtttagagtaaaatatatttttatgtgataggtttgtattagctgaggtttatatatttagctatattaggttttgtaattttattattaaattatatatattatattagtagtttgttggtaaagaaggttaaattaatttatattttgtttattatttggtgtttaaatgacgtattttattccggagatttggcggagaattttttttttagattttatagcgttttattgaagataatgtttttatatttgtagtggtttttaatttgataagattttaatttgtttaagttttttaaataagggttttaaatgtttttagtcgtttttttattgaattttttttaatttttttaagattataaagtatatgtgtaaagtaaatatttttttttattgtattgttagtcgatgatttataattaagttaataagaatttagcttttttttgttgaatgtgtttattaattatattttagtttttttttttaaattttagaatagctgtggtttttataatattatgttttttaaagctttattttatgaagggattttattatattaaagaatgaaaaaaatttttattgtagttagtatatatagttttttattttttgttttttaagatttaaattttagagctgtaaatatttttggaagcttgggtgttaatgttttattttagaaagtcgagaagttttatagagttatatagatttttaaatttattttttataaatttatagaattttgataaaagctttggtggttttattttatcgatggaatttttattacgataaatatatatgtatgaaggattttaattagtttttaaagtggttgaaaaatttaagggtacgtgattgttttttatagtgttaacgtgtgcgagatgttggaagtattggggattagtagtagtttagatgtttaaaaagataaggtgttttaatttgtgtggatttattgaagttaagtggtgaataaagataattatttagataatttagattaaagtaaaagtaaaattatatttatttgtatatatatatttatatttattttatattatagatatatatacgtatatatatattggttttgtaaataattgatttaaagtgaggattttttttgtatttttttagtaggagttttaatatttttttaattttttaattattttata

SEQ ID NO: 104 - DNA, 1920 bp, Artificial Sequence
  artificially, CGs methylated, ggcC, agCt, Ccgg synthetically methylated, bisulfite treated
ttaggttgtcgtagatatagtttttgttttttcgaaaaatacgttttaggcgccgggattttagatatttgggaaatagagtgtacgtagctgttgagaggtctcgcgtttggttttttttattattgaggcgtagaggtgttgtggatagtttagatttatacggcgttcgaggtgaaatagaatttttagtttttttatgaggtcattggtattttcggttgtttttagagcttttcgatttagagctgaatgtaaagtaagcgttcgaaatgtagaagtagccggggtcgtttacggtatttgtttcgttcggggcgagagaagacgttaggttgaggttttagcgattttaggtattagcttcgaaggagggcggggagatcgtaaaggggaagtgtccggagggtcaacggtcttcgcgtattttgcgtttttttgaagcgcgtcgttttttcgcgccggggattgggatttgtttttggggaattcgtttagaagacggcggcggattggggtcgggtattttttagggttgttaggtcttttttagttttgtatttgtcgcgtcgttttatttcgttaggaagttttagagattccggggatggggtgggagcgtttttttatcgcgggtttaaaaagaaggaaggacgtttttaggggtcgtagaaggaggattagctttaagttataatttttttcggatttaaggtaggccggttggggtttcgcgtttatacggtctttggcgggggttcgcgcgttccgggagtttcgcggttcggggaggaaagaggagataagagataggcgaggattacggggttgatttagccggggtagggattatcgtggaaaaattttggcgaggtggggggacgcggaaagagagcggtccgcgttttgtattttgcgccgggtatttcgcgttagtgtttcgtttttagtgtttcgcgtttcgcgtttcgcgttttgtttttattccgggtcagctgtatcgcgttcgcgtcgtaggaatcgtggagttggaaagtgggggcgtcgcggttggggggttgttttagctgcgtttcggtcagcgatcggcgggccgggtttaaatttagttaggttgggtaggcggtggtcgcgcgattggggaccgggcgtttcgtttttttcgtttttttttttttttttttttttttttttagttttttggtcttttttagtttttaccggatttgttcgttcgttgtttttttttttttttcgttttttatattattttttattttttcgttttgttttcgtttttttttttttttttgttttttgttttttttttttttttttttttttttaggggcggagcttttttttttttttttagataatgttgtggttgcgttttttttttcgttagctcgtttaggttttcgtcgttagcgatttttccgggttgggggtggggaggtggggggggagtgtagggttggggaggatgagctggttttttttatttttttgttgttgttttttttaagagggatggagatttggtctaagcttttcggtttatccggagctgtgatagttatttttagggaatagttacgttgttttattaagtttatttttagcggtctggattttttaggtagaggttgtgggattttgttttttttaatattttagcttatttttaaaagggtttgagccggataggggttaaataggtcttttcgatttggcgggccggtcagacgtgatagtaatgttaaggaggtcaagtttttttgtttattttttattttttttttttttatttttggattttttggcgtttttagtatatagaggtctttgagtagtccggttgtaggttttttatttatttagagtttttttttttacgtgtttatttttaattttgta

SEQ ID NO: 105 - DNA, 5473 bp, Artificial Sequence
  artificially, CGs methylated, ggcC, agCt, Ccgg synthetically methylated, bisulfite treated
gtaatgttaattagctttattttaaagaaaaattaaatattagagtaaataatgatttttttgcggagaaggagttgtaagggttggggagaggtaattagtgttataaaagttttattataaagaagtttagaatttttttgttttgttgtgtagtagagtgaaatatagtagtagaataattgtgtattattattatgataatttaatttgtttttttagaaaaagttattgtttgtagttaggatagtaggaaaatatttagaaaataattaaaatgtaaataaaagtatgaaataataataaagtttattttttaagagaaaaaaagaagagtatttagcgaaaggagaatgaagtatatataaagtaagtaatttttaggtattttgtttttttggatgttatttgtttaaatttgataatttttataggtagtatgatagattttttaaaatttaaataaagcttgtttttgtattttatttttaataataaagtatattgattgatttataaattaaagtttttaaaattttattaaagtaaaaatattgttttagagcttttattggtatgtttttgaaagtaagtgttatagttaatgtaaatttttaaaaatttttttgttatttagtataatagagggtggattttgtgttagggtggtattttttgtgtaatttatatggtctgaggttttttgttttttttttttttagaagagttggaattaagatattaataattataattgtaataattattattatgtttttaaggggttgttgagtttttggagattttagtgtatagagcgaagtaggagaggtttaaaaaggaaggttttgttgttgatgttgtgatgattaaggtagtttattattattttttttttttaacgtgattgttttgttttttttttttttgattttgttataagatgtggggaagttttttaagaattgtgtatagttcgttatagatggtggtttttgtgtttagagatcgaaagagtatttgttatagcgatattttgtaatagctgtagatgtgcgggtctaaaattgttttatgtgtttaaattaataataattattattttattttattttattatttgagcggaaatataatttgaaatatttaaatttgttttttttaaagctagaaggatatgtgtatgtgaatgtatataatttgtttttttaaatgtttttaaagtttatttttgttattatatttgtttttataattaataaagaaaatttgttttagttttaattttattgggtatggtacgtgttggagggtaggttttggaaatataaatattaatatatgtggtttgttttaaaatttaatgtatttagggttagtttcgttgttttggttaaatgaatgaataaagagtgattaaaatgcgtttattttttcgttattttatatatagtttgagatcgatcgttaatagtagattgtaaatttttgtatttaatagttattaattttttttatagtttgtatatttataaatttaattgggatattcgtttgataaatttagattttgtagagtagatttttaaggaaatttaattttagagaataaaatattttttggaatttttaaggtatttagagataaaacgttttttgtgggatttttttttaagttttataaaagtaggtctattaggattaaattatattaaagttagtgcgaggtaaggggggtgtggtttatagaaattttgggagaaagtttagtatagctttttttttttgggaatatatgttaggatggaaaaaaaaaaaaggaggggagtgttataggattaagatttattttggaaaataagatttttagtaaagatattttttttttttttattttatattagatattagaagtattatttttcgagtgtgttttttaagtttttttttaattttaggttttttttgttttttgggtcttcgattttttggtagctgggtatttgtattcgggtcttcgataggtctagtcgttggtttagtttttttcgtatgaaggcgtcgggatagtgggtttcgttaaaaagtttttttagcttattgagttgttttagggtgaaattggttcgatttcgtttttgtttgattttggtttggtcttcgttttttatttttttcgtattttttttgcgattttttagctccggggatattggagggggtattttagcggggtcatacgtgtatttatacgaatatatatatatacgtatatatatacggacgaaaatagtatagtaaattttgttattagatttgtcgtaaaaaagaatagagaatttttttttttcgtggaattttggtccggttttttaatttatccggaggaagaatattccggagaagcgtaaaggttaagtttgagcggtcgtttggggtaaggtgggtagttatttattattttttttataaacgtatttcgatttatcgttttattatttattttttagttaccggtcttttttagtaaatattaaatggtttttatttattttcgtatttatttgtttcgtagtatttatagaaattaaaggcgtagcgttaggtcttttatagagtaaagtttggatataagggcgcggtaaggtcatttattggtcttttataccggtcatttttagaaggttggttcgtttttaggtcagcttttattatcgttggttttttgtttatcgtaaatttgttggtttaatttaggaataattgggtcgaaaggtattagcgagagtaatagattccggtgttgtgtcgtatagggagtcgtattcgtagacgtttttcgttgtttttgggttcgggtcaaattttgtataaggttttttggatagttaggtaattttcgtttcgtttgttcgaccggggtcgtacgagtataggcgtttacgttatgttggttgtttaaagggttcgtcgtttaagccgggtcagaaggtaggaggcggaaaattagtttccggtggcgggcgaaagtaatcgttttttttgtttttttttcgttttttttcgtggaaacgtagattcgattttaaacgtttaatttatagagattaataggtttaagcggaatattcgcgattttcggtttttattggttgtttaaagtttttttatgtaattagtagctcggatgtttaataaaatatgaatttttttgttttgggtttgtatatattcgttgttatttttttgttttttttttttttttaaaaataggagcttttttagtgtgagtatatatagttattatatatatatttttttggaatttttattttttgcgttcgaattagagattccgggttttaagaagttaaagctgagtttagatagtcgaggttgtttgtagttttttttagcgtaggatttaggtcagtatgggtgttaaaaattatttccggaagagccggtttgtagagaaattaatatttgttttgagcttggaaattaataattttaggaattgcgttcgccgggggtttagatttgaatttcgtcgttaggcgcgttggcgaatttgtagttcgggtctgtagttgtggatttatggccgggaggttgtattgggtattttgacggtaattttattattttataaatttaggaagatttggtgttggtttggaggaagaagagtcgttagatttcggtcttgccgggtattttagctacggtgattttaaatattgtcgtattttttagtttttagagttagttttgtggatatttgttttttttttaggaaggaatattatagtaaatattatgggtcaatttaatagtaaagtatttttattgatattgtattgaaatttaaatatgaaaatatattttttaaattttgttaatgaggtgggaaggttttgtttattatatgttatttatatagtggatgttatttaaagttttggggtttcgaggagatgtttaaattttaagttgatttatagatttaataaaatttttatttttgtttttaaatttttaattattgatttaaataggaatagatcgtgttataaataatttaattgtttgtttaaatatgtgattttacgtatgttatatatttttttaattggaaaaatatggtagtatattagttattgtaggtattaagtgttaaattaattttattgttgaatttttttgaattggtatagaacgttttgttattgagataaagacgttttttaatattgagctagtattaaaggatttttgttttaagagaatcgagtattgggtgattgaaaatattaaaggaattgtgtaaatatagatttttatttttttcgtcgtttttttttttcgtttttaatatattaagaaatcgaaacgtttcgtccgggagaagtagcgtagtttggattttagctttcgttggtttttttttattttgaaagagaatgggaagttttggtctttaagatttaaagatttaggggttttgcggagttcgaggggttttggcggtcttaaatatttaggcgaccggagggttaagctttttatttttgtttttttttttttccggtaaattttgcgttagaggttagctttagtttcgtcgtttggtttagtatttttttttgtagtccggtctcgcgaatttttacgttcgtttgcgggtcatccgggttgcgggtctattttttcgttggtgaaaaatgtatttcggtggaatgggaatatttgggaagggcgcgtataaattttatacgtttttttttacgttatttttataatatattaggattttatttatgatcgagtatattaccggatttttatttttttattattattttagctgataaagctggggtttagggtctttttcgtgtttttttttttttttcgttgggtctcggagttttttttcgttcgagaggagtccggaaggcgggaaggggaatcgttgccgggggttagttaggtcgttatttttcgttagtcgcgggttgtccggttttttgtttttttcggcggcgtttatgtttagcttccggacgggagagcgtttttttttagctttttcgtttgttttttttttttttatatttttttcgtttttttcgtcgtcgttttcgtttttttcgtcgtcgttttcgccggtcgtccggattgccgggttgttgcggtcgtcgcggtccgtttcggtgtagccggtcggttttttggtctcgcgtagcggtccgttttttagtattttccggtacgtgatcgtttttttttttttttttattttttggttaaaagatttggagacgaacgtcgtaagtttttttatcgtcgtcgtacgttagtccggcgtttaatttttgttagtagagtttcgtttttttttttttttttttttttttattgttttagtttttttaataataatatattaatgggataggaggtgggg

SEQ ID NO: 106 - DNA, 1405 bp, Artificial Sequence
  Artificially, CGs methylated, reverse complement  Ca, Ct synthetically methylated, bisulfite treated
gcgggcggcgttctgagcgcaaaacgtgaattcgagtcgtcaagtttgggcgctgctggacggtttcatctggaggtcgtttcgtgtttcactaagtagaggagaaatcgaagagaattcgaagaaaggatgctgcggtctggatcatcagttctagaggctgaattcaaggacatttcttcatctagtttcgatttcattcattcacacagacgcacagggattcaaagcattcggtcgatctggaaagtcagcgatttctgcgagggtgcaaggggcgaggaagagggagcgtttttcagggcagtttcttcgacactcgagcaagggctggagacagcgcaggggacggtcggctcaggtcgaaagcggttcgacagcggttctgttctgggaggaactcgatctgcagtgtgttcgtcgcggggactcgctcagcttcgggggcgtctcgtcactttcggtcgcaggcactcaggtgagcagcgctggtttcgggacatcgatttcttttcatttcgggcgcgaagttcatctgagtaagacttcttcatggtgtcttcgtggtcgtcgctttcaggaaagtgtggcggcgaggcagcggggcgcgcgctttcagggcgctaattctgggtcggtagtaggaaggcgggaagagggggcggttcgtcgtctggagtgcatcgatcgggtttcgtttcggtttcgttttcgtttcgtttcttttcggagatgcgcatagaatttcggttcagtcggctgtggtttcgtttctgattcgttttcttttcgtttcgtgaacgtgcgcgtcgagtttcattttcgttcatttctgcgctgcgctgcatctggcggagcggggctggcgggcgtcgggtctgggagggggcgttttcgcgcggcagcgcagatcagatcagatcaggtcaggtcgggggtgggggtcgtctgcgtggttcgtcgcgttcgcagctctgcattttcagcttttcgcgctggcgtcaatggctggtttcgggagtcgtcgcacttttcagtttcgagttcgggcggggcgggttcggtcaggtggaagcgggcggaggtgcgggcgcttcgggcggtttcgtcgggcgaggcggcggcgtcgggcatcgcggcggcgtcgggcacagtcgggggtcggagtcggggtgtcggcttagtgggtcggggtagggcgggacaggacatctgttctgctacttttctggtaatcaaaagggcagagtgcgtcgattgagttggagtcttagttttctcatctgtaaatgggcgcgttggacagatgatcatttgttctttctgcgctgggcatcgtgcgcagctcggtgtatcggtgcagcggggcagacacagggagtcgttctttacaactcgggtaacg

SEQ ID NO: 107 - DNA, 2365 bp, Artificial Sequence
  Artificially, CGs methylated, reverse complement  Ca, Ct synthetically methylated, bisulfite treated
gcatgtgttcaaagatgttcagatgaggaggtgttgtgggggaggggggcgggaacagcaagttctttcagctctgcagattcagatcttttctttctctgggaagcagggatgcaaagggatagagtctgaaaaagggctttcatcactaagctgacaaagtaactacgatgttttcagctcacactctgcacagcgtcagtggtcactggatcacaattttctttcgtttcttcgtcgtttcacattcttctcaggttcagttctgaagaacagtcactggcactctgcttggcgttcagtcaaagttctggtttttcaggaggtttcgtctttttcactcagatagggctgatttcaggtgggtcgtgtgggcagctgggctcaggacattcagatgtcagttctggttctggtcatggagcggggaggatctcaggctggtcatctttcagcttggtctgacatctggacagtttgctcatttcaacacagtctttttttctttcggttcatcagagggctctgttcaagtcagtctaggagtctcttcgaggggcgggggcttcaggtttcggcagaggcaggttcgtttctcagaagttctgtttcagagcgctggagatcattgtgtgagctttttcttcgtctgctgtatttactttcgcggacgcaggacgcagagtttcagcatcggcagtcaagaggacgcaggaaagcgcacgcactcacaggctcagagacgcggacgtcagattcaggcttggacagagcagtttcgcaagtttcaacacactttgtaaatttcgaagacaggagagagtcaaaatactctttctgttcgcacgcaggtttcttctgtttttcacggttcgattctgggaggcggatgaggatattttcaggtctggatgggggtcatgggacatttcactctagattctgtcacgatctgggctgtgttcgttcggtgctttcggttcacgggctgcacaacttggcggtttcgaaactggcgtgggggaggggagggctgttcattcgagcaggacgcggctgttcactcagtcggaggtgaggaacgatctttctatttcgttgtcgggttcaagcggggttcgagagtcgtcggggagagtcaaagggaggggatcgatggatttttcagagtgaaactgtgcgttctggagagtttcgaggcagtctcgcgagttctcgaggaggtcgctgtcgcttggcaaacacaaacaacaataaaaggaaggaaattcaggcggcagtgcgcagaacgagcacagggttctgtgagggcgcgcagggtctacgcgggtgtttctaacagggtttttcacgtaggcggcgcgggcacggggtcgggggcgcgcggcgctctcagcgggagggcgtctggattaggggtttcgtcttttctcagcgcactttcgtcttttctcagcgcattttcgtttcgcgtcaggttcattcgcagggttctcttcagcacgttcgcggtcgcagcagtcagttcagcattcatcttcgaagttcgaaatgatttcattcagctgcgcgttgatcgcggggttcgacatgatggctggtgggcagcgggtcgcgcggagggcagcggcgaggaagcgttttcggcggggttcgggttctgcgcgctggctggggcgtcgcgttcgcgcttctgcagtgcagagctagtcgtcggaggagtttctaggttttctggctcagctgaatgaatgggggaggaaggcgggcgtcggtttcttttcgcgcgctgcgttttcgtttcgttttcgtctttcgggcggatcaggttttcgcattcgcatcggtctttctgtctcgcactggctgcttcgttcgtctgtcaaggtcaggtctggggggctggggttcgagtggtcgctgggggacagttctgggcacacgatcggagcgtttttcttcttttcgtctggttcgcgttcaggggacggcgagagacgcggtctcagtttcttttttcgggcgtttcgctgcggtcagatgtgggcggatgtggaggtcgggtcatggcgaggagggcgggcgttcagaggggaagagatttcttttctttttcgggcgcagggttcttctgcaggaggctgtatttgggcagtcaaacaaagttctctgtcatcgtcgtcgcgcgctctgcgtctgcaagggttaaacggcagcgcacgcggctggcaggcaggatttcggtctgtgggctcaagagtcgaggggcgcagggcgaacatgcgagtttcatggcatcagcgagaggtcatcaactttcattcatcgagggcatttctgcagctaacattttcatcacgatcat

SEQ ID NO: 108 - DNA, 4261 bp, Artificial Sequence
  Artificially, CGs methylated, reverse complement  Ca, Ct synthetically methylated, bisulfite treated
tatttctctttgtttctctctctctttttttttctttctcttctagtttgtgaggttcagtaaacacagtcaggctgagggcttcaggaagtcactgactgtgctggaggagctgttttctagttctctgctctgttctttcatcgatctcgaggctgagaatttctaagtttcgtttcaggaaacacagtgctcatagtagctctcttagaaattttattggttctggagaaaggaaggcaaactctgtctttcgctcagagttttttcaattctcactgtttttcgttgtcattgatggggaggttcacgtactcaggggaggtcaggaaggtcttgagcttgggtcgggcactgaggcgtttcacatatgctgagagcagggggaacgcattcaggcagtcaggggctaggatctcatggatcagcagcaagttcagcaggttgtagtcagcgaaggagatctgcagggcaggggggctagggactcagtcagcgggagcaggctggaggaattgggggcagagggtctaagttcattttctaggtctgctctgctttgctaaacaaatggctcacatctgtgttcatctggaagcagagggtggcgaggaaggaacagcatggggtcagatgctcatctggtctttcacaatgaaggtcttgtctttctggttctgggacagcagggtctcaaaaggcttcagttgttcgggcagtgtcttcacatagtcattcttgttcgtcttctgtcagacatcatcatgtatcattctactctcatttctttcagtttctgagacattttcgtctgtttcaggtcagacatcagagtttcagattcttctctgcttgcttttcacaatcaggctagtatcaaattctgttcacttcagctgtcaactcatctctatttcattctgtctgttcattcttgctgggttctctcatcagatgattgcaaaagctttagagctggcttctctggaggattcttctagatctcacattcagacacagttctgttcagacttctcaatggttttcattgttcttaggagacttcaaatcagtgggttcaaggtcttcgggatctgggtctactgttcgttcatctctatcttcttattcattcgacacaaatgcaagcgtacacacacacacgcacacacacgcacacgcacgcgcacacacgctgtctctgctgaactggtttcaggttttcaaatgtgctctgtgtctgcatatttttctcagctaaaagtgtcagcatcttcattcagaaactggcgacaaattcttcttcatctctggctacttcaggaagttctcgtcatttcaggagatcagaaatcatcagttgctggaggtctctgttcttgcactcgttttcatgattcgttacttggctggttgatgtttcaggcaataagggtgcaggttgtgtcttgtttcaggtttctgggtttctggttcagagctgattcagtttctgcattctgattcaagaaggggtcagttcaagtcatctgaggggtaaggggggtgagggcacaagaagtttctttctttgttcagttttcagtgttcaattctggtgcagatgctcacatagttggtgtagatgagggagatgtatttgcagcggaggttcttcacgtcgtcattcatcatgttcatcagggctgtcttctgctggttcttttcatagagttctggggttgggtggaggggagcaggtcgcgtgactgggcgtctgatcaacacacagtcactggggatgggtcaatcagggggctgtctgtgagtttcagtctgggaggaggggaagaggatgtgcgtggaaggatgagagactgtcacacagcaggtgctcagagctcatctgacatctgggaggcagtctggcacagggcaaggattgcaggcattcaggcttgatcttgggcaaactacgtaatctcagtgggtctcagttttcttcacttcagagggctgcggggcagctgatttaaacaaaagggcttcgggggcagaggcttgttcatgtctgttctggacttggaggttcaagactcatcaagggtgcggttcaggtgacgcaggatggtattggactggtacagggtgaggtcttcgttctggaacttggggagctgttcgtatagctgttgggggaggcatggctcagggaggggcactgagcttgggcgtttttcgattctagtcacagttttctaaggttcagcattttcttttcttgttcgggcatggtcacttacgcaggaggctttgagtgagttcttctgtcacgtcttcacggtcatcatcttcttctttcagctctggttctgatctgtcagcagcatgcgcagggtcgcgcagcggtctgcggggagggagaagtacgagatgtggggatcgggtcgacttcgtctcgcagcaattcggggaggggtcaggagtgcagggagggaacaggtaaacaggtttcttcgaagatttcacacaacactggggcggggagcaggcatggcgggagaggcggggaacaggaaggaggttcggggtaaaagtcacacgacggagggataagggggttcggatctcttcgggtgggcgaggggctgtgggctgcagtttcagtttctgtctttcttttctgtcagacacatgcttctatctcgaactgggaaatagatcacggtgtagggcggcactgcagcgaacaaagaaaagtttgctggagttcgggggaggatgtcaaggcgcggtgagcgcagtctgttttttcttttcgttttcggggtttcatttcttttcgaggcgcttcgggttttctgaaagtcgctaacggcactggggacgttctgggttttctaggttttcgtttcgggtctcgaggtgggcgaggagttctgtcgggagttcgggtctgatgctgcgggttggtttcatgctgggagctctgagtttcattttcggggagcgggtcgcgcgtactcactggtggcgaagactgcggcggcgaaacttcagcgaaggtctcgcggtcttcgagtcttataagggtggtttcgtttcgcttcgtttcagtgctgagtcacggcgtcggtcgctcttctggagggtttcgcggactttcgtcggtttcagtttcggcggtcgctgcatttcgggcgtcggtcgcagaggggcgttctggagttttcggagtcgtcgcgcagctggtcggggaagtctttttctctttttcaggttttcagcggggtctagggagtaaacagacagcaggaagaggatcgcagcgaagtgtgcgcagcgaactggcgcgtcgggacatcgcggggggaaattttctaagatcgctgcgatttcggagcttgcacattcgcttcacagggcaggggagaggggtggaggtcgcttagaggaaaggaaattgctttattttattttattttattttattttattttattttattattttattttattttattttattttattttattttgtgttattttattttattttatgacgtagtctcacgctgtggttcaggctggagtgcagtggcgcgatctcggcggctcactgcaatcttcgtctctcgggttcaagcaattctgcttcagtctttcgagtaggtggaattataggtgcgtgtcacatctggctgatttttgtatttttagtagagacggggtttcatcatgttggtcgggctggtctcgaacttctgatcttaggtgatctgcacgtctcggcttttcaaagtgctgggattacaggcgtgagtcatcacgtctggtcgttcaacttttatttgaagttctggggtacatgtgcaggatgtgcaggtttgttacataggtgtgtgcgtcatgatggtttgctgtacagatcatttcatcattcaggtattaagttcagtatttcttagctattctttctggtactctttcttttcagcatttcgctcaacaggcatcagtgtgtgttgatcgtcgtcatgtgatcatgtgttctcattgttcagctttcacttataagtgagatcatgcggtctcgctggttttctgtttctgtgtgagtttgctgaggctaacggctttcagcttcattcatgtttctgcaaaggacatgatcacgtttcttttagtggctgtgtcttaggctattttctttggctttgctgtctactttctgttgatttgcagatcttcatttattctagatattgatctcttgtt

SEQ ID NO: 109 - DNA, 6343 bp, Artificial Sequence
  Artificially, CGs methylated, reverse complement  Ca, Ct synthetically methylated, bisulfite treated
tctgcaaaacagaagagaaggaaggctgtaagaagcggcggtcgtcgagtgagcagggctcagatgagactacgttacactagctgttaggcgtctactgtgtgctaggcttcaggcgtgttttttcgatctgacagtctctggcatgtgcagcagcatcttcagtctagtctcgggttcaggacatttatttatcaagaggggatctttcttcagagttgtcgcaaaagtgttcagaggttagaggactataaagtcacagtgtgctggggaggctgtggatctactttcaagaatctcggtgtcggggttaagaactcatctgaacgcaatggcagcgggagtgggtgggtggagaggacttttctctttgggaagctgtatgcaaagatcattcttcagtgcttgttcattagttggagctcggtaaacatttgtagaacatcagcgtcaacgtgtttctgttctagacagcagtttttctcggttttctgtaattctgaaacgaacgggctcttggtctagggtgtttcaggagcgagctgagttcgggtctctcattcatcaggagtcactttttcatatttagtcacactttcttctagagatactaattcggtcatttatttacttactacaaataattattctaaagtatgatttaagatcgcagaggagagacactgggtggactgagcgagactgaggagagcagggcaaacgttcttggagggtttactgttcgtcaaggacggagaaatagctctggtataactgctattcagttctttttctttctctttcgggcgagtcaaatctttttcacgttttcaatcacaacgcagcgagtcaagcatttaacgcgctttttcttctctgtcacaggcaagtcgggagaggtgggtctcgaggggcttcatcgggtgggtagaagagtcgcggttgctttaaagacaagaaaagaaggttcagggctttctaggtttcttcgatctcagcgtctgtctctcttcacgctaatcagggtacgtcgacgatcggagggttcacttcgcgcgggtgcggggatcggggtgggagcaagcgttgtcgggttggcggaggcacagaggcggggcagggagctgcgggtctgtctctggtctgagtatcgtttttctgcgtctcggtctcttctgaagggagctgggttctggggagtctctggtcaaggtcgctgtctacaggaggggctgttcggcgctgtggcgtggggattcagggtggggacggtcaggcggttttttcattcgctagcgagaacgcgggcggggactctgtcgattcgattcttgtgggttcgtgggttcagaagtagcagtttggcggcttcagatttagtgattctgcagtaaaatcacaggattagtttctgattgagatgtctgttcgtgagatattacaaaattcattatcacagctttctactaactcgatatgaagtaacacagatgggattttattagttcagacttcaaatgtttacttatgataatttcggaggaaatttgcatgtcatcatcatttcgataatcttttttttttatatgtctgaactggctgcattattagctggtagtcggagcactgcagatggtaactgcaaatagtttttatttatttattttttttaaagaatgaaatatacaaaagaaaaagattgcgttgcttggtgtaaagtcagtcaattattacacattctttttttcactttttcgtgcttcagtgctgaagatcaaacaaagcaatacaaaacaaatcttcaagaactcatagagcttcactctaaggactgaaaagaaggtcaaggcgtgtttcttagctcacttctacatgttcttgtgacttggagatttattttgcagtcaaaatgagtcttgagacttgcatttttatgcttcatttaatgatcaggtctactagaagaactgagtctaaataactggggaagataattttttaaaaagagatcttcaattttcgtctgctgattcttaaacttgttctatcaagacaagtcttctgtgagaaatttggctgtcagacttcggaactggcttcaatggctaatctcacaaattgagatgggagactttttctgatgggaggtagttctcattttcaaagttcatgttctagttggaatgtatatgtcaaggactcttgttttggtcaacttgggttttatattgtgagcacacaaaaagcactacacggctaacggaggacgaggaatcatggcaaagcaggcaggcaagttctaagaaataaaacaatttgctaaaaaataatttctgatgactatcgcaagactgaaagtgcaggaaaaatacagttcgaataatttcagattctttcacattttttttcttttcatacactttgttatttcataacaaaatctttaatggaaagtttaaaaataaacagcacaggaacatgtgttttaaatgaactaaattgtgaaattagtcagtaaattaatttgtagtaagtaattatttaaggaaattaaaatactgctcagttcagttctgtattttatcatgtgtatgcgttctttacaatcaattaatataagtgctttaggaacatttgaagacaaacacgcttaacttaaggaacaaagcatctaaataatttaagtgtaattttgctgagttaaagtaaaacatttcacaaatgaagtggctatttaattttttagggaaagtttggttattgaaatgttgtatgctcatgttacatcaacaaaaatcttcaatttattttgcttatgtgctttgttttcttgatattattggtatttgaattttagatggatttctgtcaaaatgatattttgtgtgataaaagcatctttagttttgattgatagactaaaacaaatgcaaggaaatttctttaaatcagattaatttttcataaaaatattttagaatgtatgaattctgatatttacatttataatggtaaaagtttttttcgtttagtttagtaagacaatactcacacaaaagagtaaaaaaaaatcacatcatcttatgatagtttgatttctaaattgcttaagaaagtaaagtggttaaactggaaaagaggaacatatttcggaggtttagaatcgaaaatttttttcttaatcttcagctggaaaataattctctgcattcatttaaagtgtatcttctgaagtgtcagattggagttgactggtgatcaatttaaaggagttacaattcaaagaaatggtgagagcttggcattcaggtctggctttcaggtaattcgcttgggtctgagaggtcactaactgtcagttaagatggaatctttttcttttcttttttttttcaatggataacaatgggaagggggctaatctttcagtagctgaaactttgtattcagttctttatcttgagaatgctaattcttggttcgaggatttgtttctgcagtgttggcatcgagatttaagggaagatatctcgttttaaatgtcagtcacggtctggcttttctctcgacttcagcattctgtagattgttagtgtctgtggcgggggacgaaaggaacagggctttgcaaggtctgtttgtcgactgcgttatcttgggcgaaacttagtttcaaaagtcacaaatcatctacggtgaagattcttcgaagtggaacaaattttcagactcgcattatctcacatttctgcgggatagatggtcttcacttatcggctatcgggagagagctgctgtcttcgcgtttcactgcttttcggggcgattttcagcgagtcgagtcttcggctgcacggcaagcgttcgaaagtcgggtctgagaggactgcagggcttctgagggtgtcaagtttcgaaggagttcacgggtgcactggggtcttcgaaatctagtcgtcactggcagtttctttctgcttctcttcagctttctcgctcggtctcgcactctctcttctctttctttctctcatttctctctcttttctctgcttctacttcgtgtggggagtgacgtgacgtcagcagagatttcatcaaacttcactgcacagtggcgcgcgggcgtcggcgagttcgctgcgcggctggcgattcaggagcgagcacagcgttcgggcgagcgtcggggggagcgagcaggggcgacgagaaacgaggcaggggagggaagcagatgtcagcgggtcgaagagtcgggagtcggagtcgggagagcgaaaggagaggggatctggcggggcacttaggagtcaatcgaggagcaggagcacggactttcactgtggaaaggaggatcagaagggaggatgggatggaagagaagaaaaagcaatctgcgtcaattcggcagttctaataaatcaaagggggagcgtcagggcagcggggagacagaaacgtacttttggggagcaaatcaggacgggctgggaggaagcgacagggaaagtggttcaagagacggaacaaaggacaatgttcatggggttgtttgggacgaggcgtgtggagtgtgggtgtgagcgtgcgtgtgtgatcttctttcaggtctgcagagttgaggaaagaggtcacagcaaagagggactgcggagggaggaaagtgagagatcggtagagggcgggagtggaggtgggcgcggtggggatgggagaggatgagtgaagagaaatctagaagaatggagtgagctagtgggagagggtgggagggtcacagtcgggagcgaacgagctaggcttgtcagctggggaaggtcgggacgctgggttcagcttagctgggacatcgcgttcgaggtcaaggcgggtggatcaggcatgctgagagtgtcggcgcacaggtgggcacggtcacgcactgattcagtgttcacgaagggtttgcactggacaaggctcagacgctcatagagtctagaattttctctgctgtatctacattcaacaagttcattctgggtcacggatatctcattttttaaaatgacgaggttaaggtttctggcgaggatggtattaaattgcacgggatagaagtgggggtgggggagagagtttttctcaagttcacatttgcttctgcaaagcaaagagtatgtgaaattacagggcatattctcactcgaaaagtgtgtcttacttctgaattctgattttctgatttcttgacttgagcaaagatgtgtattttggtagtgagcagaatattttggctctgttctgtctctgagtggaaggactataaatataattcgtctggaggatcaggtgtgaaggcttctgtcaggcatatgggacaatgttttttcaatctcaagggcattctgttaatgtatgtttttggaaagtgtcggaacacagtcattgcttctggattcggattttttcatcaatattaatttctgcttgagagcaaaactcaggttcgctattaaaaagacatctctttggtttctaattgagaataaagttttctctaaaagttgtattgctctttctaaatcaatatatcaatactcgcaattttagaaatatatagtgactcgggagaatgtgcataaaatagatacgtttaaaaaagcttggcgcttaaaactaattctagtcactatataggtgctgggctttttctacttttgggggctgtctggaacatgttatgtgttttcttgaattacttcgtgttttgaattcatttgagttagcagtaaaaacaggcaaacaaacttgctcaatttgttttgagtgctaaatttcttcactttgaaatagctaacagtcgacagatggactcattttatggaaagggttagtctcttcagtcacgaagaaaactgattagagatctacattttaagtcatttctaatcttcacgtaacattcgtgaaaactcaaactttctctctttattcagtggaaactcaaagcagtgttatttaaggggagagaaatgagggggaaaatgttcacgtgctgtttaattgtattttctctctgactctgagaatttctatttctggtttttgaaatctcgtcgaggcaagaaaatcaaatttcttcaacaagtttcacaactgaactctagttacaggacatcggaaagtgcagttcgagaaagacatcttcatctctgttcatcgacgatttttgcagtcttttcatttctctgagtaatgggctaataattctttctttttttcttttcattttgtagagattaagaggcgctcgtagcagaacggtcttgtcttcagctggtggcgaggataggcaatt

SEQ ID NO: 110 - DNA, 9001 bp, Artificial Sequence
  Artificially, CGs methylated, reverse complement  Ca, Ct synthetically methylated, bisulfite treated
tgtaaagtgattaggagattaggagaatgttgaaacttctgctggaaaaatgcaaagaaaattctcactttgagtcagttgtttacagagtcagtgtgtgtgtgcgtgtgtgtgtctgtaatataaaatggatgtgaatatatatatacaaatagatatggttttgcttttactttaatctgaattatctagataattgtctttattcatcacttgacttcaatgggttcacacaaattaggacatcttatctttttaggcatctaggctgctgctgattttcagtgctttcaacatctcgcacacgttggcactatgaggagcagtcacgtgttcttgggtttttcaatcactttggaggctgattgaggttcttcatacatgtatatttgtcgtgatgaaagtttcatcggtagagtggagtcatcagagcttttatcaaaattctgtgggtttatgagagatgggtttagaaatctatatggctctgtggggcttctcggctttctaaaataaggcattaacattcaagctttcaaaaatatttgcagctctggggtttgaatcttgaaaaacaaggagtgaggggctgtgtatactaactacagtggagatttttttcattctttaatgtgatggagtttcttcatgaaatgaagctttaaggggcatggtattgtggggatcacagctattctgaggtttaaaagaagaaactggaatatgattagtaaacacattcagcagaaaagagctggattcttattgacttagttataggtcatcggctggcagtgcaatgggaggaaatatttactttacacatatactttatgatcttgggggaattagaggaaattcaataagaaaacggctagaaacatttaaaattcttatttaaaagacttaagcaaattagagtcttatcagattaaaaatcactacaaatgtaagagcattgtcttcagtgaaacgctgtggggtctgagaaggagattcttcgtcaaatcttcgggataaaatgcgtcatttaagcatcagataatgagcagaatgtaaattaatttaatcttctttatcaacaggctgctagtgtaatgtgtataatttagtgataagattgcaggatctaatatagctggatgtatgagtctcagctaatgcagatctgtcacatgaggatgtgttttactctgagcaggtgtctgtatgtgtggaatggggtaaagtggaataaaaggttaaaagcagaaatgctgatttaaagcttactatgaagaaatttctttcttgcagctaaattattcttaaagtgggatgatactggtgaagaaagactgaaaaacaattctcatgtgcgtctttggactgcaagtttaaaatggggaggagttgcagatagggtttgggggtggtcagggcaaaggagagacacataagttgcaaatatatttgtagtctgcttcattcactttgtttcacatcgaataagtttttcaatcttgtgaacaaggacaaggagggagtgttttaaagatacttcatgctggcattgcaaatcattgactgtaatgtcaaacaaatacacattcagagatgataacactaacttcatagtaaaacaatcgttcatgcagaaattcagaggagattagtttgttctcttcagctgatctatgctgggggacaaaaggactttcaaaaattattttgaatatgtttggatttctttctttaatttctttggaaattaaatttgcttggaaacagtgctataaagagttgatgtcttcaaaggtgattttttttgttttatataaataaggttttgcttttgctagttgagcgcagttctaggcttttcgttcttagctcacacacatttcttctgtctgcttggactttaatggctcaagacagtcttgagctcactgggaaaagaaaatgactgttaaaaattattcttgaaattggttatttggcaacattcttaattgtatggaaattcattaaggcatatttcatatataattagctcaaggttgttgattctacaggctttatggatttaaatctgattgataataaagtaaacaagagagtcgaatttaaagcgtggctctctcgggttaggacgagcttaatacagtgtacaaggaatttgaaagatctaggatatgtgtcttaatcaacgttaagtagaatggataagctttcagcattttgaaaacgctgggttagggtttctcttctattgtgtgttttctgtctggggactaataagcatcacagagaacgtgatctgaggcgactttttattcttgtataaattcagagtgaatcatcaaacagttgttcgtttaaagtcaaggtaattttcttttgacgggttcatttgcttctcgatttctaatttattagtctgtcttttcagggctctgtcttctttgcaattaaagcttcttcagattagcgcagcattcacttgacaggctgtttggaaaatttaagatcggagaggtgatttgttgctgtttttcaaattttctagttttaagtaacgtgtcttctttttatatggggtgggggattggaaatggatgtagtgagacacaaagagtgggtgtcttgttgattcttgtatctttctcttcttgatcatttcactctcttctttcaagtcttcgacttctagtctcatctcttcatctttgggttcgtactaaaagtcggatcgtcttgggctgggcaggagctgaattttcgggagcttgtctgtgtagattcagtgcgcacggcgaggcagtagttcggtttcgcactgctgataggtgcaggcaggacagtttcttcatcgcggctcggggcgttctgattggtgcggagtcacgtcagtcgcattcggagaagggtctgggaggaggcggaggcggagagggctggggagggtcgcggcggagtgacgtctcggcatcaggaagttcgtctctggttttaagatgttaggtcaacagggaagcgcggagtcgcagatctggttcgtcgctcgtctgggtgtctggagctgagctgcggcaaggttcggcttctgttcgatcgttcgaggggtgtgcgtgtgcgcgttgcggagggtgcgctcagagggtcgcgtcgtggctgcagcggctgctgtcgtcgcaggggatctaatatcatctatctgtttctgtcactcttgacacttctctgtcagggctgtcgcgtggggggggggcgggcagagcgcggtcggcgttagcttttcttattggaggggttcttgggggagggagggagagaagaagggggtctttgttcactcttgtttcgctttggagcttggaagtctgctttctaaagacgctctgagtggtgttcttctgttcacatttcatgtcttcgtttgttcgctgacttttcgtcttcggactttttcgcttgagtctttcggaggagacgggggcagcttggcttgagaactcggcgggggttgcgttttctggctcttttcgcagcggggaaacttcgcgtctagagcgcgattcggagcgggcagcggcggctacgggggctcggcggggcagtagtcaaggactagtagagcgtcgcgctttctcgttcatgaactgcatgaaaggttcgcttcacttggagcatcgagcagcggggatcaagctgtcggtcgtcttctcatctttctgtcatcattttcagtcgttagtcatggcttcggttctggctttcggtcagtttcggtcgctggacttcttcaagcacaggctggaggtgcacatcatcttcgacatcttcagttcggaggtcgcaggtaaggcgtcgcgtcgttctgcagacattttcgctcagctgctctgcgtcattcgctttctctcgtttcaaggaagtcagtttcttcggggggaggcgtggtgggagtggtcgttcgtctggcttttcgcagaactttcgggagtcggaattttgactatttcgcatttctttagttctttctcgatcggttcggcttctggggcgctaagggcgcgagcaattctgtcgttctctctattcgtattctggtctttcttctgttttctgggtcacaaaaatttcagcatcttgattcgaggatcttcagaggtcgtcgatctctgtttctgtttttctctcggctttcagctttcgaggagcttcactcgttaggaaattgtctgaaatcactcagaaatgttcttcgcgaagaggcattttttttttttttttgggaaagggtcggcgaacttcggtgttcaatcgaattttcacatctttttctagtcttttcaaatcgcatggaaatctgagctttctgcgagggggaggggggtctgtaaatcacgcgcgtgtgcgcgtttcaggagatttggtgtgtctgcgcagaggtgtataaatatacttgaaagcacaggctataaaagtgaatgtgtcgctgcagtgagataaacatgtaaataaaacgtgcggcgctgggggaggggaggaaatggggcgcggacattcacacttgcgtctgcacatttcacaggcgcagcgcttctcgcggttcggagtcgtcgcgcgcattcttcttcggcgtcaggcagttcagctctttcacggcttctgtcgtcggttcagttggcgttcgcgttgcaggtgggcatgctgacgggaaagtgtgtgtgtttcgttttcagagaaagataaaagtcagcaggggaagaatgaggacgtgggcgtcgaggattcgtctaagaagaagcggcaaaggcggcagcggactcactttatcagtcagcagcttcaggagctggaggtcacttttcagaggaatcgctattcggacatgttcacacgcgaagaaatcgctgtgtggatcaatcttacggaagttcgagttcgggtaggagtcagcacggagtctgggagggatggggggaggatgttgtggaggtacaggtcaagtagatcaggagagaatgtggaaggcagcgtcgtctgggagggcgtcggtggggcgcagctttgcaaaggcagaaggtctcgcggcggtctggttgcgagattacagttttctcttcgaggtcgacaggactgtcgttctggctcaggctttcagagcggcatcggctcactgtttcgtcatttcgcgatctcacgagctgggctgcatgggcaattttctgcacaggacattgtgtttctggcttgcagttgtcagagcagagctaataaaatttctatcaggtcaagagtcgcgaacaggcttcaatctgtgagtctttaacaaggaaaattcgtcagagacacggaagagttggttctttctgggaaatctttgtttcggttctggttcagctttttttcttctgggctcgcgcttcttacatcttctttacggttgtttcggtcattcaggtctctttcacacattctattttctagttttgtgatcttcgggagcaaagttttaatacacaactactagttctcttagaaggagaaagaaaaaaagaagaaagacttttctgcttggtttatttatcttctctcaggagttgaactctggaaattgaaactcacattttctcttctaaattataatcatagttttgtaaaaagggcttatcttaactttgtagcaaatctgtactttatggattggcaaaaatgagctcaaataaataattcaatagcaacgttctggtttatgctggtcggtggaagatttcaaatttgttaggattctggaagcagaaaacagaatcaagcaaatcaagcggcattcagaggctttgctgttaaaaaaaaaaaattaagtgctctgggtagaaaaaataaagttttcggttagagcagagcaaacaaaaagaagaaaacaacgataaaaagaataaagatcaaaatgctctttcaaatcagagggaatgaagacactctctgggtggcatttgtgcaaggcatgaggctatgctggtggataaaaggtcgggaagaagttgaaaatggttttagtttaactgttcagagtcagagctgggttctgggcggcgtggttttgagcaaggtcagtctttcattagctctcttgcacatcaagggaacgggtctctcacgtactcttctcgtctgagcaaagtttagatggtctagggtagaaatggcaagtaattaaagacagagtctatgggttttctgggattcttcgaaaacgttctttcatttcgttcgctatttcgcagcttcattctagtgctttgtagtcgcggcgctgggctcttcttgcagctgtctcttctttcagggcggctgcttgtcgagtcaagtgggagtgaggcgtgctttttatagcagtcgggtgcaaagaggaagggggataaaaaggaaatcaagaatgaaaggaaaaagagaaaaagcggattacacggctgggttcggcggagatgtgtaatgtgaaacatcactggtgtcagctcggatatctcaggtcaggtctctcttcaatacacaaaagtcgtcgtctggggcgacagggaggttcgatgtggattgggatcggggttgcggctgggtcatcggacacgggtggaagtcggtcggtctgggtggtcgtctgcaaagtcaaacgattcggctgggtctggcgcgcggacaggtctgtggtgggcttagggtaaagaagaggcagagcgaaagaagggggaatcttcaaaactattcttttcgggttttcggagtttaatatgtcaagcttctggagttaacgagctgacgaagaggtggtcttttgctctttatttggttgttttgctaggcgagaaagagtgttggcggtctagtttctgttaagggagcacgtatcagggggtgggggacgacagtggaggtcagggaaggaagggaggaattgcgtgggagaaagagcgattctctagtgttctttcagtttcttcttctcattcgtgggtctgtggctttggaatggaagcaagtttgcaaggtgtttcgggaagggttggaaaagtctgctgtttcgcgtttgttttacattaagtgtttttggatctggagaaacgtctggctgagtgatcaaatcgttcgcaggtcttcatgcgttcggctgaggtttgtggcgtagcttcgagtttcagctcgcaggtcagagcagatcaggtcttctgcgcttggtggagattcgggtcagtaactgaaagctggttctggtatcttggtgtgcagggcggtgcagtgaagcgaggtcagggtgtgtgagtgcgctagcgtgtgtgtcgggggaaggcgggggttggtcttcgatggaagttttagtaatctgcactgtggcatctgtttgctttcttgtttcaatcgttttcaggtttggttcaagaatcgtcgggtcaaatggagaaagagggagcgcaatcagcaggtcgagctatgcaagaatggcttcgggtcgcagttcaatgggctcatgcagttctacgacgacatgtattcaggctatttctacaacaactgggtcgtcaagggtcttacattcgtctttctattcatcaagagctttttcttcttcaactctatgaacgtcaattttctgtcatcacagagcatgtttttttcattcaactctatctcgttcatgagcatgtcgttcagcatggtgttctcagcagtgacaggcgtttcgggcttcagtctcaacagtctgaataacttgaacaatctgagtagttcgtcgctgaatttcgcggtgtcgacgtctgtctgttcttacgcgtcgtcgacttcttcgtatgtttatagggacacgtgtaactcgagtctggtcagtctgagactgaaagcaaagcagcacttcagcttcggctacgtcagcgtgcagaattcggtcttcaatctgagtgcttgtcagtatgcagtggatcggttcgtgtgagtcgcattcacagcgtcgggattctaggatcttgtcggatggggcaacttcgttcttgaaagactgggaattatgctagaaggtcgtgggcactaaagaaagggagagaaagagaagctatatagagaaaaggaaatcactgaatcaaagagagagcttctttgatttcaaagggatgttctcagtgtctgacatctttcactacaagtatttctaacagttgcaaggacacatacacaaacaaatgtttgactggatatgacattttaacattactataagcttgttattttttaagtttagcattgttaacatttaaatgactgaaaggatgtatatatatcgaaatgtcaaattaattttataaaagcagttgttagtaatatcacaacagtgtttttaaaggttaggctttaaaataaagcatgttatacagaagcgattaggatttttcgcttgcgagcaagggagtgtatatactaaatgtcacactgtatgtttctaacatattattattattataaaaaatgtgtgaatatcagttttagaatagtttctctggtggatgcaatgatgtttctgaaactgctatgtacaatctattctgtgtataacatttcgtacaatattattgttttacttttcagcaaatatgaaacaaatgtgttttatttcatgggagtaaaatatactgcatacaaattggtctggattctttcttttcttctctgtcactaacttggtcaggacatctcagtcactgctttctaaacaaatcagttttctctgtctgtctagttaaacatacaaggcagcagttcttatttaaatttggtagaaataaatgatagtcattcatcagaaactaaaaagaaaaaaaaaggcattttcgggggggaaaagggctacaaaatctaattttgtctcttcaatttttctttggcttaaatctagaggatttcattatggctagcaaataatatgaaaaagaaaaaagaagaaagaaatttagcaagttcatcagct

SEQ ID NO: 111 - DNA, 1920 bp, Artificial Sequence
  Artificially, CGs methylated, reverse complement  Ca, Ct synthetically methylated, bisulfite treated
tgcagggttggggataggcacgtgagggggagaactctgagtagatagggaatctgcagtcgggctgctcaagggtctctgtgtactgggggcgtcaggaggttcagggatggaaaagggggaggtgagaaatggacaaagaaacttggtcttcttggcattgctgtcacgtctggtcggttcgtcaagtcgaaggggtctgtttagtttctgttcggctcaaattcttttgggaataagctgggatgttagaaaaaacaaaatttcacaatctctgtctggggaattcaggtcgctggaggtgggcttggtagggcagcgtgactgttttctgggagtggctgtcacagcttcgggtgaatcgaggagcttgggtcaagtcttcatttctcttggagagggcagcagcaaggaggtgaggggagtcagctcattcttttcaattctgcacttttttttcatcttttcattttcagttcggaagaatcgctggcggcgggagtctggacgagctggcggggaaggggacgcagtcacagcattgtctgggagggaggggagaagcttcgtttctagaggggaggggagaagaggagggggcaggagacaaggggaggaagaaaggcgaaggcaaggcgaaggggtggagagtgatatgaagagcgagagaaaagagaggacagcggacgagcagattcggtaggggctgaaaaaggtcaaggggctggagggagggagaggaaggaggaggggagcgaggagggcggggcgttcggttttcagtcgcgcggtcatcgtctgttcagtctggctggatttgagttcggttcgtcgatcgctggtcgaggcgcagctgaagcagtttttcagtcgcggcgttttcacttttcaacttcacggtttctgcggcgcgggcgcgatgcagctggttcggggtgaaggcaaggcgcggggcgcggggcgcggggcactgggagcgaggcactggcgcgggatgttcggcgcaaggtgcagggcgcgggtcgctctcttttcgcgttttttcatctcgtcaaagttttttcacgatggtttctatttcggctgggtcagtttcgtaattctcgtctgtctcttgtcttctcttttcttttcgagtcgcggggctttcggggcgcgcggattttcgtcaggggtcgtgtaggcgcggagtttcagtcggtctgtcttgggttcgaagaaagttgtggcttggagctagttcttcttctacgatttctgggggcgttctttcttctttttgagttcgcgatgggaaggcgctttcatttcattttcggggtctctgagactttctggcgaggtggggcggcgcggcaggtgcagggctggggagggtctgacagttctggagagtgttcgatttcagttcgtcgtcgtcttctaggcggatttttcagaggcaggtttcagttttcggcgcggggaggcggcgcgcttcagaggggcgcagggtgcgcgggggtcgttggttcttcgggcactttttctttgcggtcttttcgttcttcttcggagctggtgtctgaggtcgctgggatctcagtctggcgtcttctctcgtttcgagcgaggcaggtgtcgtgggcggtttcggctacttctgcatttcgagcgcttactttgcattcagctctaagtcggagagctctggggacagtcgagagtgtcagtggtctcatagggagactgagggttctgtttcatctcgggcgtcgtgtgggtctgggctgttcacagcatctctgcgtctcagtgataggagaagtcaagcgcgaggtctctcaacagctgcgtgcactctatttttcaggtatctggaatttcggcgtctagaacgtgtttttcgggagagcaaaggctgtgtctacggcagtctgg

SEQ ID NO: 112 - DNA, 5473 bp, Artificial Sequence
  Artificially, CGs methylated, reverse complement  Ca, Ct synthetically methylated, bisulfite treated
tttcatcttctgtttcattgatgtgttattattgggggggctggagcagtaaaaaaagaagaaggaaaaaaagagcggggctctgctggcagaggttgagcgtcgggctgacgtgcggcggcgatggaagaacttacggcgttcgtcttcaagtcttttgatcagaaagtgaaggagaagaaggaggcgatcacgtatcgggaggtgctggagagcgggtcgctgcgcggggtcaaggagtcgatcggctgcatcgaggcgggtcgcgacgatcgcagcagttcggcagttcgggcggtcggcggaggcggcggcggaggaggcggaggcggcggcggaggaggcggaggaggtgtaggaggaggaggagcaggcggaggagctggaggagggcgctctttcgttcgggagctggacatgggcgtcgtcgagagaagcagggagtcgggcagttcgcgactgacggagggtaacgatctgactgattttcggcagcggtttttcttttcgtctttcggacttctctcgggcgggagaggacttcgaggttcagcggggaggggagagggacacggagagggttctggatttcagctttgtcagctagagtgatagtggaagggtgggggttcggtggtatgctcggtcatgggtggggttctagtgtgttgtgggggtggcgtggggggaagcgtgtggggtttgtgcgcgttcttttcagatgttttcatttcatcgaaatgcatttttcatcagcgggaggatgggttcgcagttcggatggttcgcaggcggacgtggaagttcgcggggtcgggctgcaggagggggtgctgaatcagacggcgggactaaagctagtctctagcgcagagtttgtcgggagggagaaggggcagaggtggaaagcttaattcttcggtcgtctaggtgtttggggtcgtcaagatttctcgaacttcgcagagtttctgaatctttggatcttaggggtcaaaacttttcattctctttcaaggtagaaggaagtcaacgaaagctgaggttcaggctacgctgcttctttcgggcgaggcgtttcggtttcttggtgtgttgggggcggggggggggggcggcgggggaggtggggatctatatttacacaatttctttagtgttttcaatcattcagtactcggttctcttagagcaaaaattctttggtgctagctcagtgttaggaaacgtctttatctcaatggcagagcgttctatatcaattcaaaggagttcaacaataaaattgatttggcacttggtgtctgcagtaactggtgtactgtcatattttttcaattaagaaaatatgtggcatgcgtggaatcacatatttaagcaagcaattaagttgtttatgacacggtctgtttctgtttagatcagtaattggaaatttggggacaaaaatagagattttattaagtctatggatcaacttgaaatttggacatcttctcgaagtttcaaaactttgagtggcattcactgtgtagatgacatgtaatagacaaagtcttttcatctcattggcagaatttgaagggtgtgttttcatatttaaatttcaatacaatatcagtaaaaatactttgctattaaattggttcataatgtttactataatgtttctttctaaagaaaggacaaatgttcacaaaactaactctgagaactagaaaatacggcaatatttaagatcatcgtagctagaatgttcggcagggtcgagatctagcgactcttctttcttcaaatcagcatcaggtctttctaaatttgtaaagtggtggagttatcgtcaaggtgttcagtgcagtctttcggtcatgagttcacaactacaggttcgaactacaggttcgtcagcgcgtctgacggcgaggttcaggtctgaattttcggcgggcgcagtttctgggattgttgattttcaagctcagggcaagtattaatttctctgcagatcggctctttcggaaatgatttttaacattcatgctggtctggattctgcgctgggaagaactgcaaacagtctcgactatctaaactcagctttgacttcttaaaattcggagtctctgattcgggcgcagaggataaaggtttcagggggatatatatatggtggctgtatatgctcacactagaagagcttctgtttttaaagggaggagaaggacaggaaagtggcaacggatgtgtgcaaattcagagcagaaaaattcatattttattaaacattcgagctgctggttgcatgaaaaggctttgagcaatcaatagaaatcgaggatcgcgaatatttcgcttgaatctgttgatctctgtgggttaagcgtttagggtcgagtctgcgttttcacgagggagggcgaagagagaacagaaagagcggttgctttcgttcgtcatcggaggctggtttttcgtcttctgtcttctggttcggcttgggcggcgagttctttgggcagtcaacatggcgtgggcgtctgtgctcgtgcgatttcggtcgggcaggcgggacggagattatctggctgttcaggggatcttatgcagggtttggttcgagttcaggggcagcgaggggcgtctgcggatgcggctttctgtgcggcacaacatcggggtctgttgctctcgctgatatctttcggttcaattgtttctaaattagatcagcaagtttgcggtaggcagagagtcagcggtggtgagagctggtctgagaacgagtcagtcttctgggaatggtcggtgtgagaggtcagtgggtggtcttgtcgcgttcttatgttcagactttgctctgtgagaggtctggcgctgcgtctttgatttctgtgagtgctgcggagcaagtgagtgcgaaagtgagtggaaatcatttggtgtttgctggggaaggtcggtgactggggggtgaatagtgaggcggtgagtcgaggtacgtttgtgaaggaggtggtggatgactgttcatcttgtttcaggcggtcgctcagacttgatctttgcgcttcttcgggatattctttcttcgggtgggttgagaagtcggatcaggatttcacgagggggaaggattctctattcttttttgcgacaaatctggtaacaggatttgctgtgctgttttcgttcgtgtgtgtgtgcgtgtgtgtgtgtgttcgtgtggatgcacgtgtggtttcgctggggtgttttcttcagtgttttcggagctgaaagatcgcaaagaggatgcgaaagggatggaggacgaaggtcagatcaaaatcaagcagaggcgaagtcggatcaatttcattctggaacaactcaatgagctggagaggctttttgacgagattcactatttcgacgtcttcatgcgagaggaactgagtcagcgactgggtctgtcggaggttcgagtgcaggtattcagctgtcaggaggtcgagggttcagggagcagagagagtctggggttggaaagaggcttgggggacacactcgggaggtggtgcttctagtgtctggtgtaagatgagaaggaaagagatatctttactagaggtcttatttttcaaagtagatcttagttctatagcacttttcttctttttttttttttcattctaacatatgttttcagaagaagaaagctgtgctgggctttctttcagagtttctataaatcacatttttcttgtctcgcactggctttaatgtggtttaattctaatgggtctacttttataaggcttaaaaaaaaatttcacagaaaacgttttatctctggatgtcttaaaagtttcaaagagtattttgttctctggagttggattttcttgaaagtctgctctgcagggtctaggtttgtcaagcggatatttcaattaggtttatagatgtgcagactataaagaaaattagtaactgttaagtgcagaaatttacagtctgctgttagcggtcgatctcaaactgtgtgtgaaatagcggagaaataaacgcattttggtcactctttgttcattcatttaatcaaggcaacgaaactgattctaaatacattagattttaaaacaaatcacatatattagtatttatattttcaaagtctgttcttcagcacgtgtcatattcaatgaagttaggactgaaacagattttctttattggttgtggaggcaaatgtaatagcaaaaataggctttgggggcatttaaaggagcaaattgtgtacattcacatacacatattcttctagctttagggggaacaaatttaaatgtttcagattgtattttcgctcagataataaaatagaataaaatgatagttattattggtttgaacacatggagcagttttaggttcgcacatctgcagctgttacaaagtatcgctgtaacagatactctttcggtctctgggcacagagatcatcatctgtagcgaactatgcacaattcttaaggggctttttcacatcttgtaacaggatcaggaaaaaaaaaaacagagcagtcacgttgaagaggaaaagtaataataggctgtcttggtcatcacagcatcagcagcagagtctttctttttaagtctcttctgcttcgctctgtgcactgagatcttcagaggctcagcaatttcttaaaaacatgatgataattattacagttatgattattagtatcttaatttcaactcttctaggggaaaaaaaggcaagaagtctcaggtcatgtgaattacacaaaggatgtcattctggcacaaaattcattctctgttgtactaaatagcagagaaatttttgaagatttacattgactatgacacttgctttcaaaaacatatcaatgaaagctctgaagcagtatttttactttaatggggttttaaaaactttaatttgtgagtcaatcaatatgctttattattgaaagtggaatacaaaagcaagctttatttgaattttaaaaaatctgtcatactgtctgtaaaagttgtcaagtttaagcaggtaacattcaggagaacaaagtatctaagagttacttgctttatatatacttcattcttctttcgctgagtgctcttctttttttctcttaagaagtgaactttattgttgtttcatacttttatttacattttagttattttctagatgtttttctactattctaactgcaaacagtggctttttctaaagaagcaaattagattatcatgataatggtgcacaattattctgctactgtgtttcactctgctgcacagcagaacagagaaattctaaacttctttgtagtgaggcttttatgacactaattatctcttttcaattcttacaacttcttcttcgcaaaggagtcattatttgctctggtgtttggtttttctttaagatgaagctaattaacattat

SEQ ID NO: 113 - DNA, 1405 bp, Artificial Sequence
  Artificially, CGs methylated, reverse complement ggcC, agCt, Ccgg synthetically methylated, bisulfite treated
gcgggcggcgttttgagcgtaaaacgtgaattcgagtcgttaagtttgggcgttgttggacggttttatttggaggtcgtttcgtgttttattaagtagaggagaaatcgaagagaattcgaagaaaggatgttgcggtctggattattagttttagaggttgaatttaaggatatttttttatttagtttcgattttatttatttatatagacgtatagggatttaaagtatccggtcgatttggaaagttagcgatttttgcgagggtgtaaggggcgaggaagagggagcgttttttagggtagttttttcgatattcgagtaagggttggagatagcgtaggggacggtcggtttaggtcgaaagcggtccgatagcggtcttgttttgggaggaattcgatttgtagtgtgttcgtcgcggggattcgtttagctccgggggcgtttcgttatttccggtcgtaggtatttaggtgagtagcgttggttccgggatatcgatttttttttattccgggcgcgaagtttatttgagtaagatttttttatggtgttttcgtggtcgtcgtttttaggaaagtgtggcggcgaggtagcggggcgcgcgtttttagggcgttaattttgggccggtagtaggaaggcgggaagagggggcggtccgtcgtttggagtgtatcgaccgggtctcgttccggtctcgttttcgtttcgtttttttccggagatgcgtatagaattccggtctagccggttgtggtttcgtttttgattcgtttttttttcgtttcgtgaacgtgcgcgtcgagttttattttcgtttatttttgcgttgcgttgtatttggcggagcggggttggcgggcgccgggtctgggagggggcgttttcgcgcggtagcgtagattagattagattaggtcaggccgggggtgggggtcgtttgcgtggtccgtcgcgttcgtagctttgtatttttagcttttcgcgttggcgttaatggttggttccgggagtcgtcgtattttttagtttcgagtccgggcggggcgggtccggtcaggtggaagcgggcggaggtgcgggcgttccgggcggtctcgccgggcgaggcggcggcgccgggtatcgcggcggcgccgggtatagccgggggtcggagccggggtgccggtttagtgggccggggtagggcgggataggatatttgttttgttatttttttggtaattaaaagggtagagtgcgtcgattgagttggagttttagtttttttatttgtaaatgggcgcgttggatagatgattatttgttttttttgcgttgggtatcgtgcgtagctcggtgtatcggtgtagcggggtagatatagggagtcgttttttataattcgggtaacg

SEQ ID NO: 114 - DNA, 2365 bp, Artificial Sequence
  Artificially, CGs methylated, reverse complement ggcC, agCt, Ccgg synthetically methylated, bisulfite treated
gtatgtgtttaaagatgtttagatgaggaggtgttgtgggggaggggggcgggaatagtaagtttttttagctttgtagatttagattttttttttttttgggaagtagggatgtaaagggatagagtttgaaaaagggtttttattattaagctgataaagtaattacgatgtttttagcttatattttgtatagcgttagtggtcattggattataattttttttcgttttttcgtcgttttatattttttttaggtctagttttgaagaatagttattggtattttgtttggcgtttagttaaagttttggttttttaggaggtctcgttttttttatttagatagggttgattttaggtgggtcgtgtgggtagctgggtttaggatatttagatgttagttttggttttggtcatggagcggggaggattttaggttggttattttttagcttggtctgatatttggatagtttgtttattttaatatagttttttttttttccggtctattagagggttttgtttaagttagtttaggagttttttcgaggggcgggggttttaggttccggtagaggtaggtccgttttttagaagttttgttttagagcgttggagattattgtgtgagcttttttttcgtttgttgtatttattttcgcggacgtaggacgtagagttttagtaccggtagttaagaggacgtaggaaagcgtacgtatttataggtttagagacgcggacgttagatttaggtttggatagagtagtttcgtaagttttaatatattttgtaaatttcgaagataggagagagttaaaatattttttttgttcgtacgtaggtcttttttgttttttacggtccgattttgggaggcggatgaggatatttttaggtctggatgggggtcatgggatattttattttagattttgttacgatttgggttgtgttcgttcggtgtttccggtctacgggttgtataatttggcggtctcgaaattggcgtgggggaggggagggttgtttattcgagtaggacgcggttgtttatttagtcggaggtgaggaacgatttttttatttcgttgccgggtttaagcggggtccgagagtcgccggggagagttaaagggaggggatcgatggattttttagagtgaaattgtgcgttttggagagtttcgaggtagtttcgcgagttttcgaggaggtcgttgtcgtttggtaaatataaataataataaaaggaaggaaatttaggcggtagtgcgtagaacgagtatagggttttgtgagggcgcgtagggtttacgcgggtgtttttaatagggttttttacgtaggcggcgcgggtacggggccgggggcgcgcggcgtttttagcgggagggcgtttggattaggggtttcgtttttttttagcgtattttcgtttttttttagcgtattttcgtttcgcgttaggtctattcgtagggttttttttagtacgttcgcggtcgtagtagttagtttagtatttattttcgaagttcgaaatgattttatttagctgcgcgttgatcgcggggttcgatatgatggttggtgggtagcgggtcgcgcggagggtagcggcgaggaagcgtttccggcggggtccgggtcttgcgcgttggttggggcgtcgcgttcgcgtttttgtagtgtagagctagtcgccggaggagtttttaggtcttttggtttagctgaatgaatgggggaggaaggcgggcgccggtcttttttcgcgcgttgcgttttcgtttcgttttcgttttccgggcggattaggttttcgtattcgtaccggtctttttgtttcgtattggttgtttcgttcgtttgttaaggtcaggtctggggggttggggtccgagtggtcgttgggggatagttttgggtatacgaccggagcgtttttttttttttcgtttggtccgcgtttaggggacggcgagagacgcggtcttagtttttttttccgggcgtttcgttgcggtcagatgtgggcggatgtggaggccgggtcatggcgaggagggcgggcgtttagaggggaagagatttttttttttttccgggcgtagggtttttttgtaggaggttgtatttgggtagttaaataaagttttttgttatcgtcgtcgcgcgttttgcgtttgtaagggttaaacggtagcgtacgcggttggtaggtaggattccggtctgtgggtttaagagtcgaggggcgtagggcgaatatgcgagttttatggtattagcgagaggtcattaatttttatttatcgagggtatttttgtagctaatatttttattacgattat

SEQ ID NO: 115 - DNA, 4261 bp, Artificial Sequence
  Artificially, CGs methylated, reverse complement ggcC, agCt, Ccgg synthetically methylated, bisulfite treated
tatttttttttgttttttttttttttttttttttttttttttttagtttgtgaggtttagtaaatatagttaggttgagggttttaggaagttattgattgtgttggaggagctgttttttagttttttgttttgtttttttatcgatttcgaggttgagaatttttaagtttcgttttaggaaatatagtgtttatagtagcttttttagaaattttattggttttggagaaaggaaggtaaattttgtttttcgtttagagtttttttaatttttattgtttttcgttgttattgatggggaggtttacgtatttaggggaggtcaggaaggtcttgagcttgggccgggtattgaggcgttttatatatgttgagagtagggggaacgtatttaggtagttaggggttaggattttatggattagtagtaagtttagtaggttgtagttagcgaaggagatttgtagggtaggggggttagggatttagttagcgggagtaggttggaggaattgggggtagagggtctaagtttattttttaggtttgttttgttttgttaaataaatggtttatatttgtgtttatttggaagtagagggtggcgaggaaggaatagtatggggtcagatgtttatttggttttttataatgaaggttttgtttttttggttttgggatagtagggttttaaaaggttttagttgtccgggtagtgtttttatatagttatttttgttcgttttttgttagatattattatgtattattttatttttattttttttagtttttgagatattttcgtttgttttaggtcagatattagagttttagatttttttttgtttgttttttataattaggttagtattaaattttgtttattttagctgttaatttatttttattttattttgtttgtttatttttgttgggtttttttattagatgattgtaaaagctttagagctggtttttttggaggatttttttagattttatatttagatatagttttgtttagattttttaatggtctttattgtttttaggagattttaaattagtgggtttaaggtcttcgggatttgggtctattgttcgtttatttttatttttttatttattcgatataaatgtaagcgtatatatatatacgtatatatacgtatacgtacgcgtatatacgttgtttttgttgaattggttttaggtttttaaatgtgttttgtgtttgtatattttttttagctaaaagtgttagtatttttatttagaaattggcgataaatttttttttatttttggttattttaggaagttttcgttattttaggagattagaaattattagttgttggaggtttttgtttttgtattcgtttttatgattcgttatttggttggttgatgttttaggtaataagggtgtaggttgtgttttgttttaggtctttgggtctttggtctagagctgatttagtttttgtattttgatttaagaaggggttagtttaagttatttgaggggtaaggggggtgagggtataagaagtttttttttttgtttagtttttagtgtttaattttggtgtagatgtttatatagttggtgtagatgagggagatgtatttgtagcggaggttttttacgtcgttatttattatgtttattagggttgttttttgttggttttttttatagagttttggggttgggtggaggggagtaggtcgcgtgattgggcgtttgattaatatatagttattggggatgggtcaattagggggttgtttgtgagttttagtttgggaggaggggaagaggatgtgcgtggaaggatgagagattgttatatagtaggtgtttagagcttatttgatatttgggaggtagtttggtatagggtaaggattgtaggtatttaggtttgattttgggtaaattacgtaattttagtgggttttagttttttttattttagagggttgcggggtagctgatttaaataaaagggttccgggggtagaggtttgtttatgtttgttttggatttggaggtttaagatttattaagggtgcggtctaggtgacgtaggatggtattggattggtatagggtgaggttttcgttttggaatttggggagctgttcgtatagctgttgggggaggtatggtttagggaggggtattgagcttgggcgtttttcgattttagttatagttttttaaggtctagtattttttttttttgtccgggtatggttatttacgtaggaggttttgagtgagtttttttgttacgtttttacggttattattttttttttttagctttggtcttgatttgttagtagtatgcgtagggtcgcgtagcggtctgcggggagggagaagtacgagatgtggggaccgggtcgatttcgtttcgtagtaatccggggaggggttaggagtgtagggagggaataggtaaataggttttttcgaagattttatataatattggggcggggagtaggtatggcgggagaggcggggaataggaaggaggtccggggtaaaagttatacgacggagggataagggggttcggatttttccgggtgggcgaggggttgtgggttgtagttttagtttttgttttttttttttgttagatatatgtttttatttcgaattgggaaatagattacggtgtagggcggtattgtagcgaataaagaaaagtttgttggagtccgggggaggatgttaaggcgcggtgagcgtagtttgtttttttttttcgtttccggggttttattttttttcgaggcgttccgggtcttttgaaagtcgttaacggtattggggacgttttgggttttttaggtcttcgttccgggtttcgaggtgggcgaggagttttgccgggagtccgggtctgatgttgcgggttggtcttatgttgggagctttgagttttatttccggggagcgggtcgcgcgtatttattggtggcgaagattgcggcggcgaaattttagcgaaggtctcgcggtcttcgagttttataagggtggtttcgtttcgtttcgttttagtgttgagttacggcgccggtcgtttttttggagggtttcgcggattttcgccggtcttagttccggcggtcgttgtattccgggcgtcggtcgtagaggggcgttttggagtttccggagtcgtcgcgtagctggccggggaagttttttttttttttttaggtttttagcggggtctagggagtaaatagatagtaggaagaggatcgtagcgaagtgtgcgtagcgaattggcgcgccgggatatcgcggggggaaattttttaagatcgttgcgattccggagcttgtatattcgttttatagggtaggggagaggggtggaggtcgtttagaggaaaggaaattgttttattttattttattttattttattttattttattttattattttattttattttattttattttattttattttgtgttattttattttattttatgacgtagttttacgttgtggtctaggttggagtgtagtggcgcgatttcggcggtttattgtaattttcgtttttcgggtttaagtaattttgttttagtttttcgagtaggtggaattataggtgcgtgttatatttggttgatttttgtatttttagtagagacggggttttattatgttggccgggttggtttcgaatttttgattttaggtgatttgtacgtttcggttttttaaagtgttgggattataggcgtgagttattacgtttggtcgtttaatttttatttgaagttttggggtatatgtgtaggatgtgtaggtttgttatataggtgtgtgcgttatgatggtttgttgtatagattattttattatttaggtattaagtttagtattttttagctattttttttggtattttttttttttagtatttcgtttaataggtattagtgtgtgttgatcgtcgttatgtgattatgtgtttttattgtttagcttttatttataagtgagattatgcggtttcgttggttttttgtttttgtgtgagtttgttgaggttaacggtttttagctttatttatgtttttgtaaaggatatgattacgttttttttagtggttgtgttttaggttattttttttggttttgttgtttattttttgttgatttgtagatttttatttattttagatattgattttttgtt

SEQ ID NO: 116 - DNA, 6343 bp, Artificial Sequence
  Artificially, CGs methylated, reverse complement ggcC, agCt, Ccgg synthetically methylated, bisulfite treated
tttgtaaaatagaagagaaggaaggttgtaagaagcggcggtcgtcgagtgagtagggtttagatgagattacgttatattagctgttaggcgtttattgtgtgttaggttttaggcgtgttttttcgatttgatagtttttggtatgtgtagtagtatttttagtttagtttcgggtctaggatatttatttattaagaggggatttttttttagagttgtcgtaaaagtgtttagaggttagaggattataaagttatagtgtgttggggaggttgtggatttatttttaagaatttcggtgccggggttaagaatttatttgaacgtaatggtagcgggagtgggtgggtggagaggatttttttttttgggaagctgtatgtaaagattattttttagtgtttgtttattagttggagctcggtaaatatttgtagaatattagcgttaacgtgtttttgttttagatagtagtttttttcggttttttgtaattttgaaacgaacgggtttttggtctagggtgttttaggagcgagctgagttcgggtcttttatttattaggagttatttttttatatttagttatatttttttttagagatattaatccggtcatttatttatttattataaataattattttaaagtatgatttaagatcgtagaggagagatattgggtggattgagcgagattgaggagagtagggtaaacgtttttggagggtttattgttcgttaaggacggagaaatagctttggtataattgttatttagtttttttttttttttttccgggcgagttaaattttttttacgtttttaattataacgtagcgagttaagtatttaacgcgtttttttttttttgttataggtaagccgggagaggtgggtttcgaggggttttaccgggtgggtagaagagtcgcggttgttttaaagataagaaaagaaggtttagggttttttaggtcttttcgattttagcgtttgtttttttttacgttaattagggtacgtcgacgaccggagggtctatttcgcgcgggtgcggggatcggggtgggagtaagcgttgtcgggttggcggaggtatagaggcggggtagggagctgcgggtctgtttttggtctgagtatcgtttttttgcgtttcggtcttttttgaagggagctgggtcttggggagtttttggtcaaggtcgttgtttataggaggggttgtccggcgttgtggcgtggggatttagggtggggacggtcaggcggtttttttattcgttagcgagaacgcgggcggggattttgtcgattcgatttttgtgggtccgtgggtctagaagtagtagtttggcggttttagatttagtgattttgtagtaaaattataggattagtttttgattgagatgtttgttcgtgagatattataaaatttattattatagctttttattaattcgatatgaagtaatatagatgggattttattagtttagattttaaatgtttatttatgataatttcggaggaaatttgtatgttattattatttcgataattttttttttttatatgtttgaattggttgtattattagctggtagccggagtattgtagatggtaattgtaaatagtttttatttatttattttttttaaagaatgaaatatataaaagaaaaagattgcgttgtttggtgtaaagttagttaattattatatatttttttttttattttttcgtgttttagtgttgaagattaaataaagtaatataaaataaatttttaagaatttatagagctttattttaaggattgaaaagaaggttaaggcgtgttttttagcttatttttatatgtttttgtgatttggagatttattttgtagttaaaatgagttttgagatttgtatttttatgttttatttaatgattaggtctattagaagaattgagtttaaataattggggaagataattttttaaaaagagatttttaattttcgtttgttgatttttaaatttgttttattaagataagttttttgtgagaaatttggttgttagatttcggaattggttttaatggttaattttataaattgagatgggagattttttttgatgggaggtagtttttatttttaaagtttatgttttagttggaatgtatatgttaaggatttttgttttggtcaatttgggttttatattgtgagtatataaaaagtattatacggttaacggaggacgaggaattatggtaaagtaggtaggtaagttttaagaaataaaataatttgttaaaaaataatttttgatgattatcgtaagattgaaagtgtaggaaaaatatagttcgaataattttagatttttttatattttttttttttttatatattttgttattttataataaaatttttaatggaaagtttaaaaataaatagtataggaatatgtgttttaaatgaattaaattgtgaaattagttagtaaattaatttgtagtaagtaattatttaaggaaattaaaatattgtttagtttagttttgtattttattatgtgtatgcgttttttataattaattaatataagtgttttaggaatatttgaagataaatacgtttaatttaaggaataaagtatttaaataatttaagtgtaattttgttgagttaaagtaaaatattttataaatgaagtggttatttaattttttagggaaagtttggttattgaaatgttgtatgtttatgttatattaataaaaatttttaatttattttgtttatgtgttttgtttttttgatattattggtatttgaattttagatggatttttgttaaaatgatattttgtgtgataaaagtatttttagttttgattgatagattaaaataaatgtaaggaaatttttttaaattagattaattttttataaaaatattttagaatgtatgaattttgatatttatatttataatggtaaaagtttttttcgtttagtttagtaagataatatttatataaaagagtaaaaaaaaattatattattttatgatagtttgatttttaaattgtttaagaaagtaaagtggttaaattggaaaagaggaatatatttcggaggtttagaatcgaaaattttttttttaatttttagctggaaaataattttttgtatttatttaaagtgtattttttgaagtgttagattggagttgattggtgattaatttaaaggagttataatttaaagaaatggtgagagcttggtatttaggtctggtttttaggtaattcgtttgggtctgagaggttattaattgttagttaagatggaattttttttttttttttttttttttaatggataataatgggaagggggttaattttttagtagctgaaattttgtatttagttttttattttgagaatgttaatttttggtccgaggatttgtttttgtagtgttggtatcgagatttaagggaagatatttcgttttaaatgttagttacggtttggtttttttttcgattttagtattttgtagattgttagtgtttgtggcgggggacgaaaggaatagggttttgtaaggtttgtttgtcgattgcgttattttgggcgaaatttagttttaaaagttataaattatttacggtgaagatttttcgaagtggaataaatttttagattcgtattattttatatttttgcgggatagatggtctttatttaccggttaccgggagagagctgttgttttcgcgttttattgttttccggggcgatttttagcgagtcgagtttccggttgtacggtaagcgttcgaaagccgggtctgagaggattgtagggtttttgagggtgttaagtttcgaaggagtttacgggtgtattggggtcttcgaaatttagtcgttattggtagtttttttttgtttttttttagctttttcgttcggtttcgtattttttttttttttttttttttttattttttttttttttttttgtttttatttcgtgtggggagtgacgtgacgttagtagagattttattaaattttattgtatagtggcgcgcgggcgccggcgagttcgttgcgcggttggcgatttaggagcgagtatagcgtccgggcgagcgccggggggagcgagtaggggcgacgagaaacgaggtaggggagggaagtagatgttagcgggtcgaagagtcgggagccggagccgggagagcgaaaggagaggggatttggcggggtatttaggagttaatcgaggagtaggagtacggatttttattgtggaaaggaggattagaagggaggatgggatggaagagaagaaaaagtaatttgcgttaatccggtagttttaataaattaaagggggagcgttagggtagcggggagatagaaacgtatttttggggagtaaattaggacgggttgggaggaagcgatagggaaagtggtctaagagacggaataaaggataatgtttatggggttgtttgggacgaggcgtgtggagtgtgggtgtgagcgtgcgtgtgtgatttttttttaggtctgtagagttgaggaaagaggttatagtaaagagggattgcggagggaggaaagtgagagaccggtagagggcgggagtggaggtgggcgcggtggggatgggagaggatgagtgaagagaaatttagaagaatggagtgagctagtgggagagggtgggagggtcatagccgggagcgaacgagctaggtttgttagctggggaaggccgggacgttgggtctagcttagctgggatatcgcgttcgaggttaaggcgggtggattaggtatgttgagagtgtcggcgtataggtgggtacggtcacgtattgatttagtgtttacgaagggtttgtattggataaggtttagacgtttatagagtttagaattttttttgttgtatttatatttaataagtttattttgggttacggatattttattttttaaaatgacgaggttaaggtttttggcgaggatggtattaaattgtacgggatagaagtgggggtgggggagagagttttttttaagtttatatttgtttttgtaaagtaaagagtatgtgaaattatagggtatatttttattcgaaaagtgtgttttatttttgaattttgattttttgattttttgatttgagtaaagatgtgtattttggtagtgagtagaatattttggttttgttttgtttttgagtggaaggattataaatataattcgtttggaggattaggtgtgaaggtttttgttaggtatatgggataatgtttttttaattttaagggtattttgttaatgtatgtttttggaaagtgccggaatatagttattgtttttggattcggatttttttattaatattaatttttgtttgagagtaaaatttaggtccgttattaaaaagatatttttttggtttttaattgagaataaagttttttttaaaagttgtattgttttttttaaattaatatattaatattcgtaattttagaaatatatagtgattcgggagaatgtgtataaaatagatacgtttaaaaaagcttggcgtttaaaattaattttagttattatataggtgttgggttttttttatttttgggggttgtttggaatatgttatgtgtttttttgaattatttcgtgttttgaatttatttgagttagtagtaaaaataggtaaataaatttgtttaatttgttttgagtgttaaatttttttattttgaaatagctaatagtcgatagatggatttattttatggaaagggttagtttttttagttacgaagaaaattgattagagatttatattttaagttatttttaatttttacgtaatattcgtgaaaatttaaattttttttttttatttagtggaaatttaaagtagtgttatttaaggggagagaaatgagggggaaaatgtttacgtgttgtttaattgtattttttttttgattttgagaatttttatttttggtttttgaaatttcgtcgaggtaagaaaattaaatttttttaataagttttataattgaattttagttataggataccggaaagtgtagttcgagaaagatatttttatttttgtttatcgacgatttttgtagtttttttatttttttgagtaatgggttaataattttttttttttttttttttattttgtagagattaagaggcgttcgtagtagaacggtcttgtttttagctggtggcgaggataggtaatt

SEQ ID NO: 117 - DNA, 9001 bp, Artificial Sequence
  Artificially, CGs methylated, reverse complement ggcC, agCt, Ccgg synthetically methylated, bisulfite treated
tgtaaagtgattaggagattaggagaatgttgaaatttttgttggaaaaatgtaaagaaaatttttattttgagttagttgtttatagagttagtgtgtgtgtgcgtgtgtgtgtttgtaatataaaatggatgtgaatatatatatataaatagatatggttttgtttttattttaatttgaattatttagataattgtttttatttattatttgattttaatgggtttatataaattaggatattttatttttttaggtatttaggttgttgttgatttttagtgtttttaatatttcgtatacgttggtattatgaggagtagttacgtgtttttgggttttttaattattttggaggttgattgaggttttttatatatgtatatttgtcgtgatgaaagttttatcggtagagtggagttattagagcttttattaaaattttgtgggtttatgagagatgggtttagaaatttatatggttttgtggggtttttcggttttttaaaataaggtattaatatttaagcttttaaaaatatttgtagctttggggtttgaattttgaaaaataaggagtgaggggttgtgtatattaattatagtggagattttttttattttttaatgtgatggagtttttttatgaaatgaagctttaaggggtatggtattgtggggattatagctattttgaggtttaaaagaagaaattggaatatgattagtaaatatatttagtagaaaagagctggatttttattgatttagttataggttatcggttggtagtgtaatgggaggaaatatttattttatatatatattttatgattttgggggaattagaggaaatttaataagaaaacggttagaaatatttaaaatttttatttaaaagatttaagtaaattagagttttattagattaaaaattattataaatgtaagagtattgtttttagtgaaacgttgtggggtttgagaaggagatttttcgttaaatttccgggataaaatgcgttatttaagtattagataatgagtagaatgtaaattaatttaattttttttattaataggttgttagtgtaatgtgtataatttagtgataagattgtaggatttaatatagctggatgtatgagttttagctaatgtagatttgttatatgaggatgtgttttattttgagtaggtgtttgtatgtgtggaatggggtaaagtggaataaaaggttaaaagtagaaatgttgatttaaagcttattatgaagaaattttttttttgtagctaaattatttttaaagtgggatgatattggtgaagaaagattgaaaaataatttttatgtgcgtttttggattgtaagtttaaaatggggaggagttgtagatagggtttgggggtggttagggtaaaggagagatatataagttgtaaatatatttgtagtttgttttatttattttgttttatatcgaataagttttttaattttgtgaataaggataaggagggagtgttttaaagatattttatgttggtattgtaaattattgattgtaatgttaaataaatatatatttagagatgataatattaattttatagtaaaataatcgtttatgtagaaatttagaggagattagtttgttttttttagctgatttatgttgggggataaaaggatttttaaaaattattttgaatatgtttggatttttttttttaatttttttggaaattaaatttgtttggaaatagtgttataaagagttgatgtttttaaaggtgattttttttgttttatataaataaggttttgtttttgttagttgagcgtagttttaggtttttcgtttttagcttatatatattttttttgtttgtttggattttaatggtttaagatagttttgagcttattgggaaaagaaaatgattgttaaaaattatttttgaaattggttatttggtaatatttttaattgtatggaaatttattaaggtatattttatatataattagcttaaggttgttgattttataggttttatggatttaaatttgattgataataaagtaaataagagagtcgaatttaaagcgtggttttttcgggttaggacgagcttaatatagtgtataaggaatttgaaagatttaggatatgtgttttaattaacgttaagtagaatggataagcttttagtattttgaaaacgttgggttagggttttttttttattgtgtgttttttgtttggggattaataagtattatagagaacgtgatttgaggcgattttttatttttgtataaatttagagtgaattattaaatagttgttcgtttaaagttaaggtaatttttttttgacgggtttatttgtttttcgatttttaatttattagtttgtttttttagggttttgttttttttgtaattaaagcttttttagattagcgtagtatttatttgataggttgtttggaaaatttaagatcggagaggtgatttgttgttgttttttaaattttttagttttaagtaacgtgttttttttttatatggggtgggggattggaaatggatgtagtgagatataaagagtgggtgttttgttgatttttgtatttttttttttttgattattttattttttttttttaagttttcgatttttagttttatttttttatttttgggttcgtattaaaagccggatcgttttgggttgggtaggagctgaatttccgggagcttgtttgtgtagatttagtgcgtacggcgaggtagtagtccggtctcgtattgttgataggtgtaggtaggatagtttttttatcgcggttcggggcgttttgattggtgcggagttacgttagtcgtatccggagaagggtttgggaggaggcggaggcggagagggttggggagggtcgcggcggagtgacgtttcggtattaggaagttcgtttttggttttaagatgttaggtcaatagggaagcgcggagtcgtagatttggttcgtcgttcgtttgggtgtttggagctgagctgcggtaaggtccggtttttgttcgatcgttcgaggggtgtgcgtgtgcgcgttgcggagggtgcgtttagagggtcgcgtcgtggttgtagcggttgttgtcgtcgtaggggatttaatattatttatttgtttttgttatttttgatatttttttgttagggttgtcgcgtggggggggggcgggtagagcgcggtcggcgttagctttttttattggaggggtttttgggggagggagggagagaagaagggggtttttgtttatttttgtttcgttttggagcttggaagtttgttttttaaagacgttttgagtggtgtttttttgtttatattttatgttttcgtttgttcgttgatttttcgtttccggattttttcgtttgagttttccggaggagacgggggtagcttggtttgagaattcggcgggggttgcgttttttggtttttttcgtagcggggaaatttcgcgtttagagcgcgatccggagcgggtagcggcggttacgggggttcggcggggtagtagttaaggattagtagagcgtcgcgttttttcgtttatgaattgtatgaaaggtccgttttatttggagtatcgagtagcggggattaagctgtcggtcgtttttttatttttttgttattatttttagtcgttagttatggtttcggttttggtttccggttagttccggtcgttggatttttttaagtataggttggaggtgtatattattttcgatatttttagtccggaggtcgtaggtaaggcgtcgcgtcgttttgtagatattttcgtttagctgttttgcgttattcgttttttttcgttttaaggaagttagtttttccggggggaggcgtggtgggagtggtcgttcgtttggtttttcgtagaatttccgggagccggaattttgattatttcgtatttttttagttttttttcgaccggtccggtttttggggcgttaagggcgcgagtaattttgtcgttttttttattcgtattttggtcttttttttgttttttgggttataaaaattttagtattttgattcgaggatttttagaggtcgtcgatttttgtttttgtttttttttcggtttttagctttcgaggagctttattcgttaggaaattgtttgaaattatttagaaatgtttttcgcgaagaggtattttttttttttttttgggaaagggccggcgaatttcggtgtttaatcgaatttttatatttttttttagtttttttaaatcgtatggaaatttgagctttttgcgagggggaggggggtttgtaaattacgcgcgtgtgcgcgttttaggagatttggtgtgtttgcgtagaggtgtataaatatatttgaaagtataggttataaaagtgaatgtgtcgttgtagtgagataaatatgtaaataaaacgtgcggcgttgggggaggggaggaaatggggcgcggatatttatatttgcgtttgtatattttataggcgtagcgtttttcgcggtccggagtcgtcgcgcgtatttttttccggcgttaggtagtttagcttttttacggtttttgtcgccggtttagttggcgttcgcgttgtaggtgggtatgttgacgggaaagtgtgtgtgtttcgtttttagagaaagataaaagttagtaggggaagaatgaggacgtgggcgtcgaggattcgtttaagaagaagcggtaaaggcggtagcggatttattttattagttagtagctttaggagctggaggtcattttttagaggaatcgttatccggatatgtttatacgcgaagaaatcgttgtgtggattaattttacggaagttcgagtccgggtaggagttagtacggagtttgggagggatggggggaggatgttgtggaggtataggtcaagtagattaggagagaatgtggaaggtagcgtcgtttgggagggcgccggtggggcgtagctttgtaaaggtagaaggtctcgcggcggtctggttgcgagattatagtttttttttcgaggtcgataggattgtcgttttggtttaggtttttagagcggtaccggtttattgtttcgttatttcgcgattttacgagctgggttgtatgggtaattttttgtataggatattgtgtttttggtttgtagttgttagagtagagctaataaaatttttattaggtcaagagtcgcgaataggttttaatttgtgagtttttaataaggaaaattcgttagagatacggaagagttggtcttttttgggaaatttttgttccggtcttggtctagcttttttttttttgggttcgcgttttttatattttttttacggttgtttcggtcatttaggttttttttatatattttattttttagttttgtgatttccgggagtaaagttttaatatataattattagtttttttagaaggagaaagaaaaaaagaagaaagatttttttgtttggtttatttatttttttttaggagttgaattttggaaattgaaatttatatttttttttttaaattataattatagttttgtaaaaagggtttattttaattttgtagtaaatttgtattttatggattggtaaaaatgagcttaaataaataatttaatagtaacgttttggtttatgttggtcggtggaagattttaaatttgttaggattttggaagtagaaaatagaattaagtaaattaagcggtatttagaggttttgttgttaaaaaaaaaaaattaagtgttttgggtagaaaaaataaagtttccggttagagtagagtaaataaaaagaagaaaataacgataaaaagaataaagattaaaatgtttttttaaattagagggaatgaagatattttttgggtggtatttgtgtaaggtatgaggttatgttggtggataaaaggccgggaagaagttgaaaatggttttagtttaattgtttagagttagagctgggttttgggcggcgtggttttgagtaaggttagttttttattagcttttttgtatattaagggaacgggtcttttacgtatttttttcgtttgagtaaagtttagatggtctagggtagaaatggtaagtaattaaagatagagtttatgggttttttgggatttttcgaaaacgtttttttatttcgttcgttatttcgtagctttattttagtgttttgtagtcgcggcgttgggttttttttgtagctgtttttttttttagggcggttgtttgtcgagttaagtgggagtgaggcgtgttttttatagtagtcgggtgtaaagaggaagggggataaaaaggaaattaagaatgaaaggaaaaagagaaaaagcggattatacggttgggtccggcggagatgtgtaatgtgaaatattattggtgttagctcggatattttaggtcaggtctttttttaatatataaaagtcgtcgtttggggcgatagggaggtccgatgtggattgggatcggggttgcggttgggtcaccggatacgggtggaagccggccggtctgggtggtcgtttgtaaagttaaacgatccggttgggtctggcgcgcggataggtctgtggtgggtttagggtaaagaagaggtagagcgaaagaagggggaatttttaaaattattttttccgggtttccggagtttaatatgttaagcttttggagttaacgagctgacgaagaggtggttttttgttttttatttggttgttttgttaggcgagaaagagtgttggcggtctagtttttgttaagggagtacgtattagggggtgggggacgatagtggaggttagggaaggaagggaggaattgcgtgggagaaagagcgattttttagtgtttttttagttttttttttttattcgtgggtttgtggttttggaatggaagtaagtttgtaaggtgttccgggaagggttggaaaagtttgttgtttcgcgtttgttttatattaagtgtttttggatttggagaaacgtttggttgagtgattaaatcgttcgtaggtttttatgcgttcggttgaggtttgtggcgtagcttcgagttttagctcgtaggtcagagtagattaggttttttgcgtttggtggagatccgggtcagtaattgaaagctggtcttggtattttggtgtgtagggcggtgtagtgaagcgaggtcagggtgtgtgagtgcgttagcgtgtgtgtcgggggaaggcgggggttggtcttcgatggaagttttagtaatttgtattgtggtatttgtttgtttttttgttttaatcgtttttaggtttggtttaagaatcgtcgggtcaaatggagaaagagggagcgtaattagtaggtcgagctatgtaagaatggtttcgggtcgtagtttaatgggtttatgtagttttacgacgatatgtatttaggttatttttataataattgggtcgttaagggtcttatattcgtttttttatttattaagagcttttttttttttaattttatgaacgttaattttttgttattatagagtatgttttttttatttaattttatttcgtttatgagtatgtcgtttagtatggtgtttttagtagtgataggcgttccgggttttagttttaatagtttgaataatttgaataatttgagtagttcgtcgttgaatttcgcggtgtcgacgtttgtttgtttttacgcgtcgtcgattttttcgtatgtttatagggatacgtgtaattcgagtttggtcagtttgagattgaaagtaaagtagtattttagcttcggttacgttagcgtgtagaatccggtctttaatttgagtgtttgttagtatgtagtggaccggtccgtgtgagtcgtatttatagcgccgggattttaggattttgccggatggggtaatttcgtttttgaaagattgggaattatgttagaaggtcgtgggtattaaagaaagggagagaaagagaagctatatagagaaaaggaaattattgaattaaagagagagcttttttgattttaaagggatgtttttagtgtttgatattttttattataagtatttttaatagttgtaaggatatatatataaataaatgtttgattggatatgatattttaatattattataagcttgttattttttaagtttagtattgttaatatttaaatgattgaaaggatgtatatatatcgaaatgttaaattaattttataaaagtagttgttagtaatattataatagtgtttttaaaggttaggttttaaaataaagtatgttatatagaagcgattaggatttttcgtttgcgagtaagggagtgtatatattaaatgttatattgtatgtttttaatatattattattattataaaaaatgtgtgaatattagttttagaatagtttttttggtggatgtaatgatgtttttgaaattgttatgtataatttattttgtgtataatatttcgtataatattattgttttattttttagtaaatatgaaataaatgtgttttattttatgggagtaaaatatattgtatataaattggtttggattttttttttttttttttgttattaatttggtcaggatattttagttattgttttttaaataaattagttttttttgtttgtttagttaaatatataaggtagtagtttttatttaaatttggtagaaataaatgatagttatttattagaaattaaaaagaaaaaaaaaggtatttccgggggggaaaagggttataaaatttaattttgtttttttaatttttttttggtttaaatttagaggattttattatggttagtaaataatatgaaaaagaaaaaagaagaaagaaatttagtaagtttattagct

SEQ ID NO: 118 - DNA, 1920 bp, Artificial Sequence
  Artificially, CGs methylated, reverse complement ggcC, agCt, Ccgg synthetically methylated, bisulfite treated
tgtagggttggggataggtacgtgagggggagaattttgagtagatagggaatttgtagccgggttgtttaagggtctttgtgtattgggggcgttaggaggtttagggatggaaaagggggaggtgagaaatggataaagaaatttggtctttttggtattgttgttacgtttggccggtccgttaagtcgaaggggtctgtttagtttttgtccggtttaaatttttttgggaataagctgggatgttagaaaaaataaaattttataatttttgtttggggaatttaggtcgttggaggtgggtttggtagggtagcgtgattgttttttgggagtggttgttatagctccgggtgaatcgaggagcttgggtcaagtttttattttttttggagagggtagtagtaaggaggtgaggggagttagcttattttttttaattttgtattttttttttatttttttatttttagtccggaagaatcgttggcggcgggagtttggacgagctggcggggaaggggacgtagttatagtattgtttgggagggaggggagaagcttcgtttttagaggggaggggagaagaggagggggtaggagataaggggaggaagaaaggcgaaggtaaggcgaaggggtggagagtgatatgaagagcgagagaaaagagaggatagcggacgagtagatccggtaggggttgaaaaaggtcaaggggttggagggagggagaggaaggaggaggggagcgaggagggcggggcgtccggtttttagtcgcgcggtcatcgtttgtttagtttggttggatttgagtccggtccgtcgatcgttggtcgaggcgtagctgaagtagttttttagtcgcggcgtttttattttttaattttacggtttttgcggcgcgggcgcgatgtagctggtccggggtgaaggtaaggcgcggggcgcggggcgcggggtattgggagcgaggtattggcgcgggatgtccggcgtaaggtgtagggcgcgggtcgtttttttttcgcgtttttttatttcgttaaagtttttttacgatggtttttattccggttgggttagtttcgtaattttcgtttgttttttgttttttttttttttttcgagtcgcggggtttccggggcgcgcggattttcgttaggggtcgtgtaggcgcggagttttagccggtctgttttgggttcgaagaaagttgtggtttggagctagttttttttttacgatttttgggggcgtttttttttttttttgagttcgcgatgggaaggcgtttttattttatttccggggtttttgagattttttggcgaggtggggcggcgcggtaggtgtagggttggggagggtctgatagttttggagagtgttcgattttagttcgtcgtcgttttttaggcggattttttagaggtaggttttagtttccggcgcggggaggcggcgcgttttagaggggcgtagggtgcgcgggggtcgttggtcttccgggtattttttttttgcggttttttcgttttttttcggagctggtgtttgaggtcgttgggattttagtttggcgttttttttcgtttcgagcgaggtaggtgtcgtgggcggtcccggttatttttgtatttcgagcgtttattttgtatttagctttaagtcggagagctttggggatagtcgagagtgttagtggtcttatagggagattgagggttttgttttatttcgggcgtcgtgtgggtttgggttgtttatagtatttttgcgttttagtgataggagaagttaagcgcgaggtcttttaatagctgcgtgtattttattttttaggtatttggaattccggcgtttagaacgtgtttttcgggagagtaaaggttgtgtttacggtagtttgg

SEQ ID NO: 119 - DNA, 5473 bp, Artificial Sequence
  Artificially, CGs methylated, reverse complement ggcC, agCt, Ccgg synthetically methylated, bisulfite treated
ttttattttttgttttattgatgtgttattattgggggggttggagtagtaaaaaaagaagaaggaaaaaaagagcggggttttgttggtagaggttgagcgccgggttgacgtgcggcggcgatggaagaatttacggcgttcgtttttaagttttttgattagaaagtgaaggagaagaaggaggcgattacgtaccgggaggtgttggagagcgggtcgttgcgcggggtcaaggagtcgaccggttgtatcgaggcgggtcgcgacgatcgtagtagtccggtagtccgggcggccggcggaggcggcggcggaggaggcggaggcggcggcggaggaggcggaggaggtgtaggaggaggaggagtaggcggaggagctggaggagggcgttttttcgtccgggagctggatatgggcgtcgtcgagagaagtagggagccgggtagttcgcgattgacggagggtaacgatttgattgatttccggtagcggttttttttttcgttttccggatttttttcgggcgggagaggatttcgaggtctagcggggaggggagagggatacggagagggtcttggattttagctttgttagctagagtgatagtggaagggtgggggtccggtggtatgttcggttatgggtggggttttagtgtgttgtgggggtggcgtggggggaagcgtgtggggtttgtgcgcgttttttttagatgtttttattttatcgaaatgtattttttattagcgggaggatgggtccgtagtccggatggtccgtaggcggacgtggaagttcgcggggccgggttgtaggagggggtgttgaattagacggcgggattaaagctagtttttagcgtagagtttgccgggagggagaaggggtagaggtggaaagcttaattttccggtcgtttaggtgtttggggtcgttaagatttttcgaatttcgtagagtttttgaatttttggattttaggggtcaaaattttttatttttttttaaggtagaaggaagttaacgaaagctgaggtttaggttacgttgttttttccgggcgaggcgtttcggttttttggtgtgttgggggcggggggggggggcggcgggggaggtggggatttatatttatataatttttttagtgtttttaattatttagtattcggtttttttagagtaaaaattttttggtgttagcttagtgttaggaaacgtttttattttaatggtagagcgttttatattaatttaaaggagtttaataataaaattgatttggtatttggtgtttgtagtaattggtgtattgttatatttttttaattaagaaaatatgtggtatgcgtggaattatatatttaagtaagtaattaagttgtttatgatacggtttgtttttgtttagattagtaattggaaatttggggataaaaatagagattttattaagtttatggattaatttgaaatttggatattttttcgaagttttaaaattttgagtggtatttattgtgtagatgatatgtaatagataaagtttttttattttattggtagaatttgaagggtgtgtttttatatttaaattttaatataatattagtaaaaatattttgttattaaattggtctataatgtttattataatgtttttttttaaagaaaggataaatgtttataaaattaattttgagaattagaaaatacggtaatatttaagattatcgtagctagaatgtccggtagggtcgagatttagcgatttttttttttttaaattagtattaggtttttttaaatttgtaaagtggtggagttatcgttaaggtgtttagtgtagttttccggtcatgagtttataattataggtccgaattataggttcgttagcgcgtttgacggcgaggtttaggtttgaatttccggcgggcgtagtttttgggattgttgatttttaagcttagggtaagtattaatttttttgtagaccggtttttccggaaatgatttttaatatttatgttggtctggattttgcgttgggaagaattgtaaatagtttcgattatttaaatttagctttgattttttaaaatccggagtttttgattcgggcgtagaggataaaggttttagggggatatatatatggtggttgtatatgtttatattagaagagcttttgtttttaaagggaggagaaggataggaaagtggtaacggatgtgtgtaaatttagagtagaaaaatttatattttattaaatattcgagctgttggttgtatgaaaaggttttgagtaattaatagaaatcgaggatcgcgaatatttcgtttgaatttgttgatttttgtgggttaagcgtttagggtcgagtttgcgtttttacgagggagggcgaagagagaatagaaagagcggttgttttcgttcgttaccggaggttggtttttcgttttttgttttttggtccggtttgggcggcgagttttttgggtagttaatatggcgtgggcgtttgtgttcgtgcgattccggtcgggtaggcgggacggagattatttggttgtttaggggattttatgtagggtttggtccgagtttaggggtagcgaggggcgtttgcggatgcggttttttgtgcggtataataccggggtttgttgttttcgttgatatttttcggtctaattgtttttaaattagattagtaagtttgcggtaggtagagagttagcggtggtgagagctggtctgagaacgagttagttttttgggaatggccggtgtgagaggtcagtgggtggtcttgtcgcgtttttatgtttagattttgttttgtgagaggtctggcgttgcgtttttgatttttgtgagtgttgcggagtaagtgagtgcgaaagtgagtggaaattatttggtgtttgttggggaaggccggtgattggggggtgaatagtgaggcggtgagtcgaggtacgtttgtgaaggaggtggtggatgattgtttattttgttttaggcggtcgtttagatttgatttttgcgtttttccgggatattttttttccgggtgggttgagaagccggattaggattttacgagggggaaggattttttatttttttttgcgataaatttggtaataggatttgttgtgttgttttcgttcgtgtgtgtgtgcgtgtgtgtgtgtgttcgtgtggatgtacgtgtggtctcgttggggtgttttttttagtgtttccggagctgaaagatcgtaaagaggatgcgaaagggatggaggacgaaggtcagattaaaattaagtagaggcgaagtcggattaattttattttggaataatttaatgagctggagaggttttttgacgagatttattatttcgacgtttttatgcgagaggaattgagttagcgattgggtctgtcggaggtccgagtgtaggtatttagctgttaggaggtcgagggtctagggagtagagagagtttggggttggaaagaggtttgggggatatattcgggaggtggtgtttttagtgtttggtgtaagatgagaaggaaagagatatttttattagaggttttattttttaaagtagattttagttttatagtatttttttttttttttttttttttattttaatatatgtttttagaagaagaaagctgtgttgggtttttttttagagtttttataaattatattttttttgtttcgtattggttttaatgtggtttaattttaatgggtctatttttataaggtttaaaaaaaaattttatagaaaacgttttatttttggatgttttaaaagttttaaagagtattttgttttttggagttggatttttttgaaagtttgttttgtagggtttaggtttgttaagcggatattttaattaggtttatagatgtgtagattataaagaaaattagtaattgttaagtgtagaaatttatagtttgttgttagcggtcgattttaaattgtgtgtgaaatagcggagaaataaacgtattttggttattttttgtttatttatttaattaaggtaacgaaattgattttaaatatattagattttaaaataaattatatatattagtatttatatttttaaagtttgttttttagtacgtgttatatttaatgaagttaggattgaaatagattttttttattggttgtggaggtaaatgtaatagtaaaaataggttttgggggtatttaaaggagtaaattgtgtatatttatatatatatatttttttagctttagggggaataaatttaaatgttttagattgtattttcgtttagataataaaatagaataaaatgatagttattattggtttgaatatatggagtagttttaggtccgtatatttgtagctgttataaagtatcgttgtaatagatattttttcggtttttgggtatagagattattatttgtagcgaattatgtataatttttaaggggtttttttatattttgtaataggattaggaaaaaaaaaaatagagtagttacgttgaagaggaaaagtaataataggttgttttggttattatagtattagtagtagagtttttttttttaagttttttttgtttcgttttgtgtattgagatttttagaggtttagtaattttttaaaaatatgatgataattattatagttatgattattagtattttaattttaatttttttaggggaaaaaaaggtaagaagttttaggtcatgtgaattatataaaggatgttattttggtataaaatttattttttgttgtattaaatagtagagaaatttttgaagatttatattgattatgatatttgtttttaaaaatatattaatgaaagctttgaagtagtatttttattttaatggggttttaaaaattttaatttgtgagttaattaatatgttttattattgaaagtggaatataaaagtaagctttatttgaattttaaaaaatttgttatattgtttgtaaaagttgttaagtttaagtaggtaatatttaggagaataaagtatttaagagttatttgttttatatatattttatttttttttcgttgagtgttttttttttttttttttaagaagtgaattttattgttgttttatatttttatttatattttagttattttttagatgtttttttattattttaattgtaaatagtggttttttttaaagaagtaaattagattattatgataatggtgtataattattttgttattgtgttttattttgttgtatagtagaatagagaaattttaaatttttttgtagtgaggtttttatgatattaattatttttttttaatttttataatttttttttcgtaaaggagttattatttgttttggtgtttggtttttttttaagatgaagctaattaatattat

SEQ ID NO: 120 - protein, 4 aa, Arthrobacter luteus
AGCT

SEQ ID NO: 121 - protein, 4 aa, Arthrobacter luteus
TCGA

SEQ ID NO: 122 - protein, 4 aa, Haemophilus aegyptius
GGCC

SEQ ID NO: 123 - protein, 4 aa, Haemophilus aegyptius
CCGG

SEQ ID NO: 124 - protein, 4 aa, Moraxella bovis
CCGG

SEQ ID NO: 125 - protein, 4 aa, Moraxella bovis
GGCC

SEQ ID NO: 126 - DNA, 21 bp, Artificial Sequence
  Artificial primer desinged for Septin9 HM assay
gttgtttattagttattatgt

SEQ ID NO: 127 - DNA, 19 bp, Artificial Sequence
  Artificial primer desinged for Septin9 HM assay
aaataatcccatccaacta

SEQ ID NO: 128 - DNA, 33 bp, Artificial Sequence
  Artificial Blocker designed for Septin9 HM assay uncoserved
gttattatgttggattttgtggttaatgtgtag

SEQ ID NO: 129 - DNA, 18 bp, Artificial Sequence
  Artificial probe for Septin9 HM assay unconserved
cgttaaccgcgaaatccg

SEQ ID NO: 130 - DNA, 21 bp, Artificial Sequence
  Artificial primer for conserved Septin9 HM assay
gctgttcatcagtcatcatgt

SEQ ID NO: 131 - DNA, 19 bp, Artificial Sequence
  Artificial primer for conserved Septin9 HM assay
aaatgatcccatccagctg

SEQ ID NO: 132 - DNA, 33 bp, Artificial Sequence
  Artificial Blocker for conserved Septin9 HM assay
gtcatcatgttggattttgtggtcaatgtgcag

SEQ ID NO: 133 - DNA, 18 bp, Artificial Sequence
  Artificial probe for conserved Septin9 HM assay
cgttgaccgcgaaatccg

SEQ ID NO: 134 - DNA, 66 bp, Artificial Sequence
  bisulfited treated segment of Septin 9 sequence
ttcgttgtttattagttattatgtcggatttcgcggttaacgcgtagttggatgggattatttcgg

SEQ ID NO: 135 - DNA, 64 bp, Artificial Sequence
  Preserved and bisulfite treated segment of Sepin9
ttcgctgttcatcagtcatcatgtcggatttcgcggtcaacgcgcagctggatgggatcatttc

What is claimed is:

1) A method for preserving genomic DNA complexity comprising treating the said genomic DNA, or a fragment thereof, with an enzyme or series of enzymes that adds a methyl group to a cytosine outside of CpG dinucleotide sequences of the said genomic DNA, or a fragment thereof.

2) A method according to claim 1, further obtaining methylation analysis of the said genomic DNA comprising treating the said preserved genomic DNA, or a fragment thereof, with one or more reagents to convert unmethylated cytosine bases to uracil or to another base that is detectably dissimilar to cytosine in terms of hybridization properties; amplifying the preserved and treated genomic DNA by means of an amplification enzyme and at least one oligonucleotide, wherein said oligonucleotide is identical, is complementary, or hybridizes under stringent or highly stringent conditions to at least 9 base long segment of preserved and treated genomic DNA; and detecting the methylation state or level of at least one CpG dinucleotide of the genomic DNA, or an average, or a value reflecting an average methylation state or level of a plurality of CpG dinucleotides of the genomic DNA based on a presence, absence or amount of, or on a property of said amplificate.

3) A method according to claim 1, wherein said genomic DNA comprises at least one target region, said target region comprises of at least 16 contiguous nucleotides selected from a group consist of SEQ ID Nos.: 1 to 7, wherein said contiguous nucleotides comprise at least one CpG dinucleotide sequence.

4) A method according to claim 3, further comprising:
a) contacting the preserved and treated genomic DNA, or fragment thereof, with an amplification enzyme and at least one oligonucleotide which is identical, is complementary, or hybridizes under stringent or highly stringent conditions to at least 9 base long segment of a sequence selected from SEQ ID NOs: 36 to 63 and SEQ ID NOs: 92 to 119, wherein the treated genomic DNA or the fragment thereof is either amplified to produce at least one amplificate, or is not amplified; and
b) determining, based on a presence, absence or amount of, or on a property of said amplificate, the methylation state or level of at least one CpG dinucleotide of SEQ ID Nos: 1 to 7, or an average, or a value reflecting an average methylation state or level of a plurality of CpG dinucleotides of SEQ ID Nos.: 1 to 7.

5) A method according to claim 4, further comprising use of at least one nucleic acid molecule or peptide nucleic acid molecule comprising in each case a contiguous sequence at least 9 nucleotides in length that is complementary to a sequence selected from the group consisting of SEQ ID NO: 36 to 63 and SEQ ID NOs: 92 to 119, and complements thereof, wherin said nucleic acid molecule or peptide nucleic acid molecule suppresses amplification of the nucleic acid to which it is hybridized.

6) A method according to claim 1, wherein an enzyme or series of enzymes is selected from a group consisting of Alu Methyltransferase, HaeIII Methyltransferase, MSP1 Methyltransferase, and DNMT2.

7) A method according to claim 2, wherein, the reagent is a solution of a bisulfite, hydrogen sulfite or disulfite.

8) A method according to claim 2, further detecting, monitoring, prognosis and/or classifying cell proliferative disorders is, at least in part, afforded.

9) A method according to claim 14 wherein said cell proliferative disorder is hepatocellular, colorectal, lung, breast, or prostate cell proliferative disorders.

10) A nucleic acid comprising at least 16 contiguous nucleotides of a DNA sequence selected from the group consisting of SEQ ID Nos.: 8 to 119, and sequences complementary thereto.

11) An oligonucleotide which is identical, is complementary, or hybridizes under stringent or highly stringent conditions to at least 9 base long segment of treated and preserved genomic DNA according to claim 2.

12) An oligonucleotide which is identical, is complementary, or hybridizes under stringent or highly stringent conditions to at least 9 base long segment of a sequence selected from SEQ ID NOs.: 36-63 and SEQ ID NOs.: 92 to 119.

13) A kit suitable for performing the methods according to any of the preceding claims comprising (a) an enzyme or series of enzymes that adds a methyl group to a cytosine outside of the CpG dinucleotide sequences of the said genomic DNA, or a fragment thereof; (b) containers suitable for containing the said enzyme and the biological sample of the patient; and optionally (c) instructions for use and interpretation of the kit results.

14) A kit according to claim 14, further comprising (a) one or more reagents to convert unmethylated cytosine bases to uracil or to anther base that is detectably dissimilar to cytosine in terms of hybridization properties (b) at least oligonucleotide which is identical, is complementary, or hybridizes under stringent or highly stringent conditions to at least 9 base long segment of a sequence selected from SEQ ID NOs.: 8-119.

15) Use of a method according to claims 1 to 8, a nucleic acid and an oligonucleotide according to claims 10 to 12 and/or a kit according to claims 13 to 14 in the diagnosis, prognosis, monitoring and/or classification of cellular proliferative disorders.
